(19) United States
(12) Patent Application Publication
(10) Pub. No.: US 2026/0091113 A1
(43) Pub. Date: Apr. 2, 2026

(54) Biallelic Knockout of CTLA4

(71) Applicant: EmendoBio Inc., Wimington, DE (US)

(72) Inventor: Rafi EMMANUEL, Ramla (IL)

(21) Appl. No.: 19/113,071

(22) PCT Filed: Sep. 18, 2023
(86) PCT No.: PCT/US2023/074439

§ 371 Date: Mar. 19, 2025

Related U.S. Application Data
(60) Provisional application No. 63/376,267, filed on Sep. 19, 2022.

(51) Int. Cl. A61K 40/36; A61K 40/11; C12N 9/22; C12N 15/11; C12N 15/90

(52) U.S. Cl. CPC A61K 40/36; A61K 40/11; C12N 9/226; C12N 15/11; C12N 15/907; C12N 2310/20

(57) ABSTRACT

Compositions comprising an RNA molecule comprising a guide sequence portion having 17-50 contiguous nucleotides containing nucleotides in the sequence set forth in any one of SEQ ID NOs: 1-4891 and methods and uses thereof.

[0001] This application is a Section 371 national stage of PCT International Application No. PCT/US2023/074439, filed Sep. 18, 2023, and claims the benefit of U.S. Provisional Application No. 63/376,267 filed Sep. 19, 2022, the content of which is hereby incorporated by reference.

[0002] Throughout this application, various publications are referenced, including referenced in parenthesis. The disclosures of all publications mentioned in this application in their entireties are hereby incorporated by reference into this application in order to provide additional description of the art to which this invention pertains and of the features in the art which can be employed with this invention.

### REFERENCE TO SEQUENCE LISTING

[0003] This application incorporates-by-reference nucleotide sequences which are present in the file named “230918_92038-A-PCT_Sequence_Listing_AWG.xml”, which is 4,234 kilobytes in size, and which was created on Sep. 13, 2023 in the IBM-PC machine format, having an operating system compatibility with MS-Windows, which is contained in the XML file filed Mar. 19, 2025 as part of this application.

### BACKGROUND OF INVENTION

[0004] Chimeric antigen receptors (CAR) provide a promising approach for immunotherapy. However, to make such therapies (e.g., CAR-T cell therapies) more accessible, it is highly desirable to develop an allogeneic adoptive transfer strategy in which universal CAR cells derived from cells of healthy donors can be applied to treat multiple patients. In order to implement such a strategy, the immunogenicity and reactivity of CAR-T cells must be optimized to avoid harmful reactions, such as rejection by the host or graft-versus-host-disease.

### SUMMARY OF THE INVENTION

[0005] CTLA4 is an inhibitory receptor acting as a major negative regulator of T-cell responses. Disclosed are approaches for knocking out the CTLA4 gene in cells to be utilized for immunotherapy approaches, such as CAR-T therapy. A cell modified to have a CTLA4 knockout improves performance of the cell in allogeneic adoptive transfer therapy. Such cells have improved activity, retention, and/or expansion qualities for use in adoptive cancer immunotherapy.

[0006] The present disclosure also provides a method for inactivating alleles of the Cytotoxic T-lymphocyte-associated protein 4 (CTLA4) gene in a cell, the method comprising
[0007] introducing to the cell a composition comprising:
   [0008] at least one CRISPR nuclease, or a polynucleotide molecule encoding the CRISPR nuclease; and
   [0009] an RNA molecule comprising a guide sequence portion having 17-50 nucleotides, or a polynucleotide molecule encoding the RNA molecule,
[0010] wherein a complex of the CRISPR nuclease and the RNA molecule affects a double strand break in the allele of the CTLA4 gene.

[0011] In some embodiments, the RNA molecule comprises a guide sequence portion that targets a sequence that is located within any one of Exons 1-4 of the CTLA4 gene, or a sequence that is located within a genomic range selected from any one of 2:203867904-203868089, 2:203870547-203870971, 2:203871339-203871525, and 2:203872669-203872850. In some embodiments, the guide sequence portion of the RNA molecule comprises 17-50 contiguous nucleotides containing nucleotides in the sequence set forth in any one of SEQ ID NOs: 1-4891.

[0012] According to embodiments of the present invention, there is provided an RNA molecule comprising a guide sequence portion having 17-50 contiguous nucleotides containing nucleotides in the sequence set forth in any one of SEQ ID NOs: 1-4891.

[0013] According to embodiments of the present invention, there is provided a composition comprising an RNA molecule comprising a guide sequence portion having 17-50 contiguous nucleotides containing nucleotides in the sequence set forth in any one of SEQ ID NOs: 1-4891 and a CRISPR nuclease.

[0014] According to embodiments of the present invention, there is provided a method for inactivating a CTLA4 allele in a cell, the method comprising delivering to the cell a composition comprising an RNA molecule comprising a guide sequence portion having 17-50 contiguous nucleotides containing nucleotides in the sequence set forth in any one of SEQ ID NOs: 1-4891 and a CRISPR nuclease. In some embodiments, the cell is a lymphocyte. In some embodiments, the cell is a T cell. In some embodiments, the cell is a T regulatory cell. In some embodiments, the cell is a B cell. In some embodiments, the cell is a natural killer (NK) cell. In some embodiments, the cell is a macrophage. In some embodiments, the cell is a stem cell. In some embodiments, the cell is an iPSC. In some embodiments, the cell is a fibroblast, blood cell, hepatocyte, keratinocyte, or any other cell type capable of being reprogrammed to an induced pluripotent stem cell (iPSC). In some embodiments, the delivering to the cell is performed in vivo, ex vivo, or in vitro. In some embodiments, the method is performed ex vivo and the cell is provided/explanted from an individual patient. In some embodiments, the method further comprises the step of introducing the resulting cell, with the modified/knocked out CTLA4 allele, into an individual patient. In some embodiments, the cell is originated from the individual patient to be treated. In some embodiments, the cell is originated from a donor. In some embodiments, the cell is allogeneic to the individual patient to which it is introduced.

[0015] According to embodiments of the present invention, there is provided a method for improving the activity and/or retention and/or expansion of a cell for adoptive cell therapy, the method comprising delivering to a cell of a subject in need of the adoptive cell therapy a composition comprising an RNA molecule comprising a guide sequence portion having 17-50 contiguous nucleotides containing nucleotides in the sequence set forth in any one of SEQ ID NOS: 1-4891 and a CRISPR nuclease. In some embodiments, the method is for increasing persistence and/or engraftment of a cell in a host subject, the method comprising delivering to the cell a composition comprising an RNA molecule comprising a guide sequence portion having 17-50 contiguous nucleotides containing nucleotides in the sequence set forth in any one of SEQ ID NOS: 1-4891 and a CRISPR nuclease; and introducing the cell to the host subject. In some embodiments, the cell is further differentiated prior to introducing the cell to the host subject. In some embodiments, the cell is further engineered to express a chimeric antigen receptor. In some embodiments, the cell is a stem cell, an iPSC, or a progenitor cell and is differentiated to a T cell prior to introducing the cell to the host subject. In some embodiments, the cell is a T cell. In some embodiments, the cell is further engineered to have additional genes inactivated and/or knocked-out in order to improve the use of the cell for adoptive transfer, e.g. knockout of additional genes to avoid graft-versus-host disease (GVHD) following introduction of the cell into a host subject.

[0016] According to embodiments of the present invention, there is provided use of a composition comprising an RNA molecule comprising a guide sequence portion having 17-50 contiguous nucleotides containing nucleotides in the sequence set forth in any one of SEQ ID NOs: 1-4891 and a CRISPR nuclease for inactivating a CTLA4 allele in a cell, comprising delivering to the cell the composition comprising an RNA molecule comprising a guide sequence portion having 17-50 contiguous nucleotides containing nucleotides in the sequence set forth in any one of SEQ ID NOs: 1-4891 and a CRISPR nuclease.

[0017] According to embodiments of the present invention, there is provided a medicament comprising an RNA molecule comprising a guide sequence portion having 17-50 contiguous nucleotides containing nucleotides in the sequence set forth in any one of SEQ ID NOs: 1-4891 and a CRISPR nuclease for use in inactivating a CTLA4 allele in a cell, wherein the medicament is administered by delivering to the cell the composition comprising an RNA molecule comprising a guide sequence portion having 17-50 contiguous nucleotides containing nucleotides in the sequence set forth in any one of SEQ ID NOs: 1-4891 and a CRISPR nuclease.

[0018] According to embodiments of the present invention, there is provided use of a composition comprising an RNA molecule comprising a guide sequence portion having 17-50 contiguous nucleotides containing nucleotides in the sequence set forth in any one of SEQ ID NOs: 1-4891 and a CRISPR nuclease for improving the activity and/or retention and/or expansion of a cell for adoptive cell therapy or increasing persistence of the cell upon engraftment, comprising delivering to a cell of a subject in need of the adoptive cell therapy the composition of comprising an RNA molecule comprising a guide sequence portion having 17-50 contiguous nucleotides containing nucleotides in the sequence set forth in any one of SEQ ID NOs: 1-4891 and a CRISPR nuclease.

[0019] According to embodiments of the present invention, there is provided a method of treating a disease or disorder, the method comprising delivering any one of the compositions or the modified cells described herein to the subject, preferably wherein the disease or disorder is cancer.

[0020] According to embodiments of the present invention, there is provided a kit for inactivating a CTLA4 allele in a cell, comprising an RNA molecule comprising a guide sequence portion having 17-50 contiguous nucleotides containing nucleotides in the sequence set forth in any one of SEQ ID NOs: 1-4891, a CRISPR nuclease, and optionally a tracrRNA molecule; and instructions for delivering the RNA molecule, CRISPR nuclease, and optionally the tracrRNA to the cell.

### BRIEF DESCRIPTION OF THE DRAWINGS

[0021] FIG. 1: CTLA4 editing in HeLa cells. OMNI-103 CRISPR nuclease was expressed in a mammalian cell system (HeLa cells) by DNA transfection, together with an sgRNA-expressing plasmid. Transfection efficiency (% transfection) was determined by flow cytometry measurement of mCherry signal. All tests were done in triplicate. ‘OMNI nuclease only’ (i.e. no guide) transfected cells served as a negative control, and no editing was observed in those cells (data not shown).

[0022] FIG. 2: CTLA4 editing in primary T cells. T cells obtained from a donor were thawed and activated with beads for 72 h. Then, a cleavage activity assay was performed with OMNI-103 CRISPR nuclease (113 pmol)+sgRNA (226 μmol) and 2×10⁶ cells per treatment. After seven (7) days, ˜100,000 cells were sorted by FACS and sent for next-generation sequencing (NGS) analysis. Robotic PCR on DNA lysate from Quick Extract was used to prepare NGS samples. *The Freq. of Parent and the geometric mean were presented in the CTLA4 positive.

### DETAILED DESCRIPTION

[0023] Unless otherwise defined, all technical and/or scientific terms used herein have the same meaning as commonly understood by one of ordinary skill in the art to which the invention pertains. Although methods and materials similar or equivalent to those described herein can be used in the practice or testing of embodiments of the invention, exemplary methods and/or materials are described below. In case of conflict, the patent specification, including definitions, will control. In addition, the materials, methods, and examples are illustrative only and are not intended to be necessarily limiting.

[0024] It should be understood that the terms “a” and “an” as used above and elsewhere herein refer to “one or more” of the enumerated components. It will be clear to one of ordinary skill in the art that the use of the singular includes the plural unless specifically stated otherwise. Therefore, the terms “a,” “an” and “at least one” are used interchangeably in this application.

[0025] For purposes of better understanding the present teachings and in no way limiting the scope of the teachings, unless otherwise indicated, all numbers expressing quantities, percentages or proportions, and other numerical values used in the specification and claims, are to be understood as being modified in all instances by the term “about.” Accordingly, unless indicated to the contrary, the numerical parameters set forth in the following specification and attached claims are approximations that may vary depending upon the desired properties sought to be obtained. At the very least, each numerical parameter should at least be construed in light of the number of reported significant digits and by applying ordinary rounding techniques.

[0026] Unless otherwise stated, adjectives such as “substantially” and “about” modifying a condition or relationship characteristic of a feature or features of an embodiment of the invention, are understood to mean that the condition or characteristic is defined to within tolerances that are acceptable for operation of the embodiment for an application for which it is intended. Unless otherwise indicated, the word “or” in the specification and claims is considered to be the inclusive “or” rather than the exclusive or, and indicates at least one of, or any combination of items it conjoins.

[0027] In the description and claims of the present application, each of the verbs, “comprise,” “include” and “have” and conjugates thereof, are used to indicate that the object or objects of the verb are not necessarily a complete listing of components, elements or parts of the subject or subjects of the verb. Other terms as used herein are meant to be defined by their well-known meanings in the art.

[0028] In some embodiments of the present invention, a DNA nuclease is utilized to affect a DNA break at a target site to induce cellular repair mechanisms, for example, but not limited to, non-homologous end-joining (NHEJ). During classical NHEJ, two ends of a double-strand break (DSB) site are ligated together in a fast but also inaccurate manner (i.e. frequently resulting in mutation of the DNA at the cleavage site in the form of small insertion or deletions).

[0029] As used herein, the term “modified cells” refers to cells in which a double strand break is affected by a complex of an RNA molecule and the CRISPR nuclease as a result of hybridization with the target sequence, i.e. on-target hybridization.

[0030] This invention provides a modified cell or cells obtained by use of any of the methods described herein. In an embodiment these modified cell or cells are capable of giving rise to progeny cells. In an embodiment these modified cell or cells are capable of giving rise to progeny cells after engraftment. As a non-limiting example, the modified cells may be hematopoietic stem cells (HSCs), or any cell suitable for an allogenic cell transplant or autologous cell transplant.

[0031] As used herein, the term “targeting sequence” or “targeting molecule” refers a nucleotide sequence or molecule comprising a nucleotide sequence that is capable of hybridizing to a specific target sequence, e.g., the targeting sequence has a nucleotide sequence which is at least partially complementary to the sequence being targeted along the length of the targeting sequence. The targeting sequence or targeting molecule may be part of an RNA molecule that can form a complex with a CRISPR nuclease, either alone or in combination with other RNA molecules, with the targeting sequence serving as the targeting portion of the CRISPR complex. When the molecule having the targeting sequence is present contemporaneously with the CRISPR nuclease, the RNA molecule, alone or in combination with an additional one or more RNA molecules (e.g. a tracrRNA molecule), is capable of targeting the CRISPR nuclease to the specific target sequence. As non-limiting example, a guide sequence portion of a CRISPR RNA molecule or single-guide RNA molecule may serve as a targeting molecule. Each possibility represents a separate embodiment. A targeting sequence can be custom designed to target any desired sequence.

[0032] The term “targets” as used herein, refers to preferentially hybridizing a targeting sequence of a targeting molecule to a nucleic acid having a targeted nucleotide sequence. It is understood that the term “targets” encompasses variable hybridization efficiencies, such that there is preferential targeting of the nucleic acid having the targeted nucleotide sequence, but unintentional off-target hybridization in addition to on-target hybridization might also occur. It is understood that where an RNA molecule targets a sequence, a complex of the RNA molecule and a CRISPR nuclease molecule targets the sequence for nuclease activity.

[0033] The “guide sequence portion” of an RNA molecule refers to a nucleotide sequence that is capable of hybridizing to a specific target DNA sequence, e.g., the guide sequence portion has a nucleotide sequence which is partially or fully complementary to the DNA sequence being targeted along the length of the guide sequence portion. In some embodiments, the guide sequence portion is 17, 18, 19, 20, 21, 22, 23, 24, 25, 26, 27, 28, 29, 30, 31, 32, 33, 34, 35, 36, 37, 38, 39, 40, 41, 42, 43, 44, 45, 46, 47, 48, 49 or 50 nucleotides in length, or approximately 17-50, 17-49, 17-48, 17-47, 17-46, 17-45, 17-44, 17-43, 17-42, 17-41, 17-40, 17-39, 17-38, 17-37, 17-36, 17-35, 17-34, 17-33, 17-31, 17-50, 17-29, 17-28, 17-27, 17-26, 17-25, 17-24, 17-22, 17-21, 18-25, 18-24, 18-23, 18-22, 18-21, 19-25, 19-24, 19-23, 19-22, 19-21, 19-20, 20-22, 18-20, 20-21, 21-22, or 17-20 nucleotides in length. Preferably, the entire length of the guide sequence portion is fully complementary to the DNA sequence being targeted along the length of the guide sequence portion. The guide sequence portion may be part of an RNA molecule that can form a complex with a CRISPR nuclease with the guide sequence portion serving as the DNA targeting portion of the CRISPR complex. When the RNA molecule having the guide sequence portion is present contemporaneously with the CRISPR molecule, alone or in combination with an additional one or more RNA molecules (e.g. a tracrRNA molecule), the RNA molecule is capable of targeting the CRISPR nuclease to the specific target DNA sequence. Accordingly, a CRISPR complex can be formed by direct binding of the RNA molecule having the guide sequence portion to a CRISPR nuclease or by binding of the RNA molecule having the guide sequence portion and an additional one or more RNA molecules to the CRISPR nuclease. Each possibility represents a separate embodiment. A guide sequence portion can be custom designed to target any desired sequence. Accordingly, a molecule comprising a “guide sequence portion” is a type of targeting molecule. In some embodiments, the guide sequence portion comprises a sequence that is the same as, or differs by no more than 1, 2, 3, 4, or 5 nucleotides from, a guide sequence portion described herein, e.g., a guide sequence set forth in any of SEQ ID NOs: 1-4891. Each possibility represents a separate embodiment. In some of these embodiments, the guide sequence portion comprises a sequence that is the same as a sequence set forth in any of SEQ ID NOs: 1-4891. Throughout this application, the terms “guide molecule,” “RNA guide molecule,” “guide RNA molecule,” and “gRNA molecule” are synonymous with a molecule comprising a guide sequence portion.

[0034] The term “non-discriminatory” as used herein refers to a guide sequence portion of an RNA molecule that targets a specific DNA sequence that is common to all alleles of a gene.

[0035] In embodiments of the present invention, an RNA molecule comprises a guide sequence portion having 17-50 contiguous nucleotides containing nucleotides in the sequence set forth in any one of SEQ ID NOs: 1-4891.

[0036] The RNA molecule and/or the guide sequence portion of the RNA molecule may contain modified nucleotides. Exemplary modifications to nucleotides/polynucleotides may be synthetic and encompass polynucleotides which contain nucleotides comprising bases other than the naturally occurring adenine, cytosine, thymine, uracil, or guanine bases. Modifications to polynucleotides include polynucleotides which contain synthetic, non-naturally occurring nucleosides e.g., locked nucleic acids. Modifications to polynucleotides may be utilized to increase or decrease stability of an RNA. An example of a modified polynucleotide is an mRNA containing 1-methyl pseudo-uridine. For examples of modified polynucleotides and their uses, see U.S. Pat. No. 8,278,036, PCT International Publication No. WO/2015/006747, and Weissman and Kariko (2015), each of which is hereby incorporated by reference.

[0037] As used herein, “contiguous nucleotides” set forth in a SEQ ID NO refers to nucleotides in a sequence of nucleotides in the order set forth in the SEQ ID NO without any intervening nucleotides.

[0038] In embodiments of the present invention, the guide sequence portion may be 17-50 nucleotides in length and contain 20-22 contiguous nucleotides in the sequence set forth in any one of SEQ ID NOs: 1-4891. In embodiments of the present invention, the guide sequence portion may be less than 22 nucleotides in length. For example, in embodiments of the present invention the guide sequence portion may be 17, 18, 19, 20, or 21 nucleotides in length. In such embodiments the guide sequence portion may consist of 17, 18, 19, 20, or 21 nucleotides, respectively, in the sequence of 17-22 contiguous nucleotides set forth in any one of SEQ ID NOs: 1-4891. For example, a guide sequence portion having 17 nucleotides in the sequence of 17 contiguous nucleotides set forth in SEQ ID NO: 4887 may consist of any one of the following nucleotide sequences (nucleotides excluded from the contiguous sequence are marked in strike-through):

(SEQ ID NO: 4887)
AAAAAAAUGUACUUGGUUCC
17 nucleotide guide sequence 1:
(SEQ ID NO: 4888) [symbol]
AAAAAUGUACUUGGUUCC
17 nucleotide guide sequence 2:
(SEQ ID NO: 4889) [symbol]
AAAAAUGUACUUGGUUC [symbol]
17 nucleotide guide sequence 3:
(SEQ ID NO: 4890) [symbol]
AAAAAAUGUACUUGGUU [symbol]
17 nucleotide guide sequence 4:
(SEQ ID NO: 4891)
AAAAAAAUGUACUUGGU

[symbol]

[0039] In embodiments of the present invention, the guide sequence portion may be greater than 20 nucleotides in length. For example, in embodiments of the present invention the guide sequence portion may be 21, 22, 23, 24, 25, 26, 27, 28, 29, or 30 nucleotides in length. In such embodiments the guide sequence portion comprises 17-50 nucleotides containing the sequence of 20, 21 or 22 contiguous nucleotides set forth in any one of SEQ ID NOs: 1-4891 and additional nucleotides fully complimentary to a nucleotide or sequence of nucleotides adjacent to the 3′ end of the target sequence, 5′ end of the target sequence, or both.

[0040] In embodiments of the present invention, a CRISPR nuclease and an RNA molecule comprising a guide sequence portion form a CRISPR complex that binds to a target DNA sequence to effect cleavage of the target DNA sequence. CRISPR nucleases, e.g. Cpf1, may form a CRISPR complex comprising a CRISPR nuclease and RNA molecule without a further tracrRNA molecule. Alternatively, CRISPR nucleases, e.g. Cas9, may form a CRISPR complex between the CRISPR nuclease, an RNA molecule, and a tracrRNA molecule. A guide sequence portion, which comprises a nucleotide sequence that is capable of hybridizing to a specific target DNA sequence, and a sequence portion that participates in CRIPSR nuclease binding, e.g. a tracrRNA sequence portion, can be located on the same RNA molecule. Alternatively, a guide sequence portion may be located on one RNA molecule and a sequence portion that participates in CRIPSR nuclease binding, e.g. a tracrRNA portion, may located on a separate RNA molecule. A single RNA molecule comprising a guide sequence portion (e.g. a DNA-targeting RNA sequence) and at least one CRISPR protein-binding RNA sequence portion (e.g. a tracrRNA sequence portion), can form a complex with a CRISPR nuclease and serve as the DNA-targeting molecule. In some embodiments, a first RNA molecule (e.g. a crRNA molecule) comprising a DNA-targeting RNA portion which includes a guide sequence portion and a separate RNA molecule (e.g. a tracrRNA molecule) comprising a CRISPR protein-binding RNA sequence interact by base pairing to form an RNA complex (e.g. a crRNA:tracrRNA complex) that targets the CRISPR nuclease to a DNA target site or, alternatively, are fused together to form an RNA molecule (e.g. a sgRNA molecule) that complexes with the CRISPR nuclease and targets the CRISPR nuclease to a DNA target site.

[0041] In embodiments of the present invention, an RNA molecule comprising a guide sequence portion may further comprise the sequence of a tracrRNA molecule. Such embodiments may be designed as a synthetic fusion of the guide portion of the RNA molecule and the trans-activating crRNA (tracrRNA). (See Jinek et al., 2012). In such an embodiment, the RNA molecule is a single guide RNA (sgRNA) molecule. Embodiments of the present invention may also form CRISPR complexes utilizing a separate tracrRNA molecule and a separate RNA molecule comprising a guide sequence portion (e.g. a crRNA molecule). In such embodiments the tracrRNA molecule may hybridize with the RNA molecule via basepairing and may be advantageous in certain applications of the invention described herein.

[0042] The term “tracr mate sequence” refers to a sequence sufficiently complementary to a tracrRNA molecule so as to hybridize to the tracrRNA via basepairing and promote the formation of a CRISPR complex. (See U.S. Pat. No. 8,906,616). In embodiments of the present invention, the RNA molecule may further comprise a portion having a tracr mate sequence.

[0043] A “gene,” for the purposes of the present disclosure, includes a DNA region encoding a gene product, as well as all DNA regions which regulate the production of the gene product, whether or not such regulatory sequences are adjacent to coding and/or transcribed sequences. Accordingly, a gene includes, but is not necessarily limited to, promoter sequences, terminators, translational regulatory sequences such as ribosome binding sites and internal ribosome entry sites, enhancers, silencers, insulators, boundary elements, replication origins, matrix attachment sites and locus control regions.

[0044] “Eukaryotic” cells include, but are not limited to, fungal cells (such as yeast), plant cells, animal cells, mammalian cells and human cells.

[0045] The term “nuclease” as used herein refers to an enzyme capable of cleaving the phosphodiester bonds between the nucleotide subunits of nucleic acid. A nuclease may be isolated or derived from a natural source. The natural source may be any living organism. Alternatively, a nuclease may be a modified or a synthetic protein which retains the phosphodiester bond cleaving activity. Gene modification can be achieved using a nuclease, for example a CRISPR nuclease.

[0046] According to embodiments of the present invention, there is provided a method for inactivating alleles of the Cytotoxic T-lymphocyte-associated protein 4 (CTLA4) gene in a cell, the method comprising
[0047] introducing to the cell a composition comprising:
   [0048] at least one CRISPR nuclease, or a polynucleotide molecule encoding the CRISPR nuclease; and
   [0049] an RNA molecule comprising a guide sequence portion, or a polynucleotide molecule encoding the same,
[0050] wherein a complex of the CRISPR nuclease and the RNA molecule affects a double strand break in alleles of the CTLA4 gene, and
[0051] wherein the guide sequence portion of the RNA molecule comprises 17-50 contiguous nucleotides containing nucleotides in the sequence set forth in any one of SEQ ID NOs: 1-4891.

[0052] In some embodiments, the guide sequence portion contains a sequence of nucleotides as listed in SEQ ID NOs: 1-4891, or a portion of any one of SEQ ID NOs: 1-4891, and optionally contains additional nucleotides prepended or appended to the beginning or end of the sequence of nucleotides. As a non-limiting example, a 17-nucleotide sequence found within SEQ ID NO: 1 may form a guide sequence portion. Additionally, a guide sequence portion may comprise a 17-nucleotide sequence found within SEQ ID NO: 1 and further include additional nucleotides 5′ or 3′ of the 17-nucleotide sequence found within SEQ ID NO: 1.

[0053] In some embodiments, the RNA molecule is a crRNA molecule and the composition further comprises a tracrRNA molecule that forms a crRNA:tracrRNA complex with the crRNA molecule. In some embodiments, the RNA molecule is an sgRNA molecule.

[0054] In some embodiments, the composition comprises additional RNA molecules comprising a guide sequence portion comprising 17-50 contiguous nucleotides containing nucleotides in the sequence set forth in any one of SEQ ID NOs: 1-4891.

[0055] In some embodiments, the guide sequence portion of the RNA molecule comprises 17-50 contiguous nucleotides containing nucleotides in the sequence set forth in any one of SEQ ID NOs: 1-4891 modified to comprise up to five mismatches relative to the target site.

[0056] In some embodiments, the method is a method of preparing modified immune cells (e.g., T cells) for use in immunotherapy. In some embodiments, the method is performed in vitro or ex vivo.

[0057] In some embodiments, the composition is introduced to a cell in a subject or to a cell in culture.

[0058] In some embodiments, the cell is a lymphocyte, a T cell, a T regulatory cell, a B cell, a natural killer (NK) cell, a macrophage, a stem cell, or a fibroblast, blood cell, hepatocyte, keratinocyte, or any other cell type capable of being reprogrammed to an induced pluripotent stem cell (iPSC).

[0059] In some embodiments, the cell is a hematopoietic stem cell (HSC), induced pluripotent stem cell (iPS cell), iPSc-derived cell, natural killer cell (NK), iPS-derived NK cell (iNK), T cell, innate-like T cell (iT), natural killer T cell (NKT), γδ T cell, iPSc-derived T cell, invariant NKT cells (iNKT), iPSc-derived NKT, monocyte, or macrophage.

[0060] In some embodiments, the CRISPR nuclease and the RNA molecule are introduced to the cell at substantially the same time or at different times.

[0061] In some embodiments, alleles of the CTLA4 gene in the cell are subjected to an insertion or deletion mutation.

[0062] In some embodiments, the insertion or deletion mutation creates an early stop codon.

[0063] In some embodiments, the inactivating results in a truncated protein encoded by the mutated allele. For example, the method of inactivating mutates a CTLA4 allele such that the mutated allele encodes a truncated form of a CTLA4 protein.

[0064] In some embodiments, the composition introduced to the cell further comprises a second RNA molecule comprising a guide sequence portion, wherein the guide sequence portion of the second RNA molecule comprises 17-50 contiguous nucleotides containing nucleotides in the sequence set forth in any one of SEQ ID NOs: 1-4891, preferably wherein the guide sequence portion of the second RNA molecule differs from the guide sequence portion of the first RNA molecule.

[0065] According to embodiments of the present invention, there is provided a method for inactivating alleles of the Cytotoxic T-lymphocyte-associated protein 4 (CTLA4) gene in a cell, the method comprising
[0066] introducing to the cell a composition comprising:
   [0067] at least one CRISPR nuclease, or a polynucleotide molecule encoding a CRISPR nuclease; and
   [0068] an RNA molecule comprising a guide sequence portion, or a polynucleotide molecule encoding the RNA molecule,
[0069] wherein a complex of the CRISPR nuclease and the RNA molecule affects a double strand break in alleles of the CTLA4 gene,
[0070] wherein the guide sequence portion of the RNA molecule comprises 17-50 contiguous nucleotides containing nucleotides in the sequence set forth in any one of SEQ ID NOs: 1-4891 modified to contain 1, 2, 3, 4, or 5 nucleotide mismatches relative to a fully-complementary target sequence of the guide sequence portion.

[0071] In some embodiments, the guide sequence portion of the RNA molecule comprises 1, 2, 3, 4, or 5 nucleotide mismatches relative to a fully-complementary target sequence of the guide sequence portion.

[0072] In some embodiments, the guide sequence portion provides higher targeting specificity to the complex of the CRISPR nuclease and the RNA molecule relative to a guide sequence portion that has higher complementarity to an allele of the CTLA4 gene.

[0073] In some embodiments, the composition introduced to the cell further comprises a second RNA molecule comprising a guide sequence portion, wherein the guide sequence portion of the RNA molecule comprises 17-50 contiguous nucleotides containing nucleotides in the sequence set forth in any one of SEQ ID NOs: 1-4891, or any one of SEQ ID NOs: 1-4891 modified to contain 1, 2, 3, 4, or 5 nucleotide mismatches relative to a fully-complementary target sequence of the guide sequence portion, preferably wherein the guide sequence portion of the second RNA molecule differs from the guide sequence portion of the first RNA molecule.

[0074] According to embodiments of the present invention, there is provided a composition comprising an RNA molecule which comprises a guide sequence portion comprising 17-50 contiguous nucleotides containing nucleotides in the sequence set forth in any one of SEQ ID NOS: 1-4891.

[0075] In some embodiments, the composition further comprises a second RNA molecule which comprises a guide sequence portion comprising 17-50 contiguous nucleotides containing nucleotides in the sequence set forth in any one of SEQ ID NOs: 1-4891, preferably wherein the guide sequence portion of the second RNA molecule differs from the guide sequence portion of the first RNA molecule.

[0076] According to embodiments of the present invention, there is provided a composition comprising an RNA molecule which comprises a guide sequence portion comprising 17-50 contiguous nucleotides containing nucleotides in the sequence set forth in any one of SEQ ID NOS: 1-4891, or any one of SEQ ID NOs: 1-4891 modified to contain 1, 2, 3, 4, or 5 nucleotide mismatches relative to a fully-complementary target sequence of the guide sequence portion.

[0077] In some embodiments, the composition further comprises a second RNA molecule which comprises a guide sequence portion comprising 17-50 contiguous nucleotides containing nucleotides in the sequence set forth in any one of SEQ ID NOs: 1-4891, or any one of SEQ ID NOs: 1-4891 modified to contain 1, 2, 3, 4, or 5 nucleotide mismatches relative to a fully-complementary target sequence of the guide sequence portion, preferably wherein the guide sequence portion of the second RNA molecule differs from the guide sequence portion of the first RNA molecule.

[0078] In some embodiments, any one of the compositions described herein further comprises a CRISPR nuclease.

[0079] In some embodiments, any one of the compositions described herein further comprises a tracrRNA molecule.

[0080] According to embodiments of the present invention, there is provided a cell modified by any one of the methods described herein or modified using the any one of the compositions described herein. The modified cell may also have additional genes altered in order to improve their use for adoptive transfer, for example, reducing or preventing graft-versus-host disease (GVHD).

[0081] Preferably all alleles of the CTLA4 gene are inactivated such that the modified cell cannot express a full-length, functional CTLA4 protein product.

[0082] In some embodiments, the cell is any one of a wherein the cell is a lymphocyte, a T cell, a T regulatory cell, a B cell, a natural killer (NK) cell, a macrophage, a stem cell, or a fibroblast, blood cell, hepatocyte, keratinocyte, or any other cell type capable of being reprogrammed to an induced pluripotent stem cell (iPSC).

[0083] In some embodiments, the cell is a hematopoietic stem cell (HSC), induced pluripotent stem cell (iPS cell), iPSc-derived cell, natural killer cell (NK), iPS-derived NK cell (iNK), T cell, innate-like T cell (iT), natural killer T cell (NKT), γδ T cell, iPSc-derived T cell, invariant NKT cell (iNKT), iPSc-derived NKT, monocyte, or macrophage.

[0084] In some embodiments, the cell is a stem cell or any cell type capable of being reprogrammed to an induced pluripotent stem cell (iPSC).

[0085] In some embodiments, the stem cell is differentiated after it is modified.

[0086] In some embodiments, the stem cell is differentiated into any one of a lymphocyte, a T cell, a T regulatory cell, a B cell, a natural killer (NK) cell, innate-like T cell (iT), natural killer T cells (NKT), γδ T cell, invariant NKT cells (iNKT), monocyte, or macrophage.

[0087] According to embodiments of the present invention, there is provided a medicament comprising any one of the compositions described herein for use in inactivating a CTLA4 allele in a cell, wherein the medicament is administered by delivering to the cell the composition.

[0088] According to embodiments of the present invention, there is provided a use of any one of the compositions or modified cells described herein for adoptive immunotherapy, for example, to treat cancer.

[0089] According to embodiments of the present invention, there is provided a medicament comprising any one of the compositions or modified cells described herein for use in adoptive immunotherapy, for example, to treat cancer.

[0090] According to embodiments of the present invention, there is provided a kit for inactivating a CTLA4 allele in a cell, comprising any one of the compositions described herein and instructions for delivering the composition to the cell.

[0091] In some embodiments, the composition is delivered to the cell ex vivo.

[0092] According to embodiments of the present invention, there is provided a kit for administering adoptive immunotherapy to a subject, comprising any one of the compositions or modified cells described herein and instructions for delivering any one of the compositions or modified cells to a subject in need of adoptive immunotherapy.

[0093] According to embodiments of the present invention, there is provided any one of the compositions or modified cells described herein for use in adoptive immunotherapy, comprising delivering any one of the compositions or modified cells described herein to a subject in need of adoptive immunotherapy.

[0094] A method of treating a disease or disorder, the method comprising delivering any one of the compositions or modified cells described herein to the subject, preferably wherein the disease or disorder is cancer.

[0095] According to embodiments of the present invention, there is provided a composition, method, process, kit, or use as characterized by one or more elements disclosed herein.

[0096] According to embodiments of the present invention, the modified immune cells (e.g., T cells) obtained by the described methods are intended to be used as a medicament for treating a cancer, infection, or immune disease in a subject in need thereof. The administration of the modified immune cell or a population thereof to a subject may be carried out in any convenient manner known in the art, including, but not limited to, aerosol inhalation, injection, ingestion, transfusion, implantation or transplantation. Injection or transfusion may be performed subcutaneously, intradermally, intratumorally, intranodally, intramedullary, intramuscularly, by intravenous or intralymphatic injection, or intraperitoneally. According to embodiments of the present invention, there is provided a method for adoptive cell therapy or prophylaxis comprising administering the modified cells to a subject suffering from or determined to be at risk of suffering from a cancer or an infection.

[0097] According to embodiments of the present invention, there is provided use of any one of the compositions or modified cells described herein for adoptive immunotherapy, comprising delivering the composition of any one of the compositions or modified cells described herein to a subject in need of adoptive immunotherapy.

[0098] According to embodiments of the present invention, there is provided a medicament comprising any one of the compositions or modified cells described herein for use in adoptive immunotherapy, wherein the medicament is administered by delivering any one of the compositions or modified cells described herein to a subject in need of adoptive immunotherapy.

[0099] According to embodiments of the present invention, there is provided an RNA molecule for use in modifying a cell (e.g. lymphocyte, T-cell, CAR-T cell) which may be used for adoptive immunotherapy. The RNA molecule may be delivered to the cell ex vivo, in vitro, or in vivo.

[0100] According to embodiments of the present invention, there is provided a kit for inactivating a CTLA4 allele in a cell, comprising any one of the compositions described herein and instructions for delivering the composition to the cell.

[0101] According to embodiments of the present invention, there is provided a cell modified by the method described herein or modified using the compositions described herein.

[0102] According to embodiments of the present invention, there is provided a gene editing composition comprising an RNA molecule comprising a guide sequence portion having 17-50 contiguous nucleotides containing nucleotides in the sequence set forth in any one of SEQ ID NOS: 1-4891. In some embodiments, the RNA molecule further comprises a portion having a sequence which binds to a CRISPR nuclease. In some embodiments, the sequence which binds to a CRISPR nuclease is a tracrRNA sequence. In some embodiments the RNA comprising a guide sequence portion is a crRNA molecule. In some embodiments an RNA molecule comprising a guide sequence portion is a single-guide RNA (sgRNA) molecule.

[0103] In some embodiments, the RNA molecule further comprises a portion having a tracr mate sequence.

[0104] In some embodiments, the RNA molecule may further comprise one or more linker portions.

[0105] According to embodiments of the present invention, an RNA molecule may be up to 1000, 900, 800, 700, 600, 500, 450, 400, 350, 300, 290, 280, 270, 260, 250, 240, 230, 220, 210, 200, 190, 180, 170, 160, 150, 140, 130, 120, 110, or 100 nucleotides in length. Each possibility represents a separate embodiment. In embodiments of the present invention, the RNA molecule may be 17 up to 300 nucleotides in length, 100 up to 300 nucleotides in length, 150 up to 300 nucleotides in length, 100 up to 500 nucleotides in length, 100 up to 400 nucleotides in length, 200 up to 300 nucleotides in length, 100 to 200 nucleotides in length, or 150 up to 250 nucleotides in length. Each possibility represents a separate embodiment.

[0106] According to some embodiments of the present invention, the composition further comprises a tracrRNA molecule.

[0107] According to some embodiments of the present invention, there is provided a method for inactivating CTLA4 expression in a cell, the method comprising delivering to the cell a composition comprising an RNA molecule comprising a guide sequence portion having 17-50 contiguous nucleotides containing nucleotides in the sequence set forth in any one of SEQ ID NOs: 1-4891 and a CRISPR nuclease.

[0108] According to embodiments of the present invention, at least one CRISPR nuclease and the RNA molecule or RNA molecules are delivered to the subject and/or cells substantially at the same time or at different times.

[0109] In some embodiments, a tracrRNA molecule is delivered to the subject and/or cells substantially at the same time or at different times as the CRISPR nuclease and RNA molecule or RNA molecules.

[0110] The compositions and methods of the present disclosure may be utilized for improved adoptive immunotherapy.

[0111] Any one of, or combination of, the strategies for deactivating CTLA4 expression described herein may be used in the context of the invention.

[0112] In embodiments of the present invention, a guide RNA molecule is used to direct a CRISPR nuclease to an exon or a splice site of a CTLA4 allele in order to create a double-stranded break (DSB), leading to insertion or deletion of nucleotides by inducing an error-prone non-homologous end-joining (NHEJ) mechanism and formation of a frameshift mutation in the CTLA4 allele. The frameshift mutation may result in, for example, inactivation or knockout of the CTLA4 allele by generation of an early stop codon in the CTLA4 allele and to generation of a truncated protein or to nonsense-mediated mRNA decay of the transcript of the allele. In further embodiments, one RNA molecule is used to direct a CRISPR nuclease to a promotor of a CTLA4 allele.

[0113] Embodiments of compositions described herein include at least one CRISPR nuclease, guide RNA molecule(s), and optionally a tracrRNA molecule(s), being effective in a subject or cells at the same time. The at least one CRISPR nuclease, guide RNA molecule(s), and optional tracrRNA molecule(s) may be delivered substantially at the same time or can be delivered at different times but have effect at the same time. For example, this includes delivering the CRISPR nuclease to the subject or cells before the guide RNA molecule and/or tracrRNA molecule is substantially extant in the subject or cells.

[0114] In some embodiments, the cell is a lymphocyte. In some embodiments, the cell is a T cell. In some embodiments, the cell is a T regulatory cell. In some embodiments, the cell is a B cell. In some embodiments, the cell is a natural killer (NK) cell. In some embodiments, the cell is a macrophage. In some embodiments, the cell is a stem cell. In some embodiments, the cell is a fibroblast, blood cell, hepatocyte, keratinocyte, or any other cell type capable of being reprogrammed to an induced pluripotent stem cell (iPSC).

### CTLA4 Editing Strategies

[0115] The present invention provides methods to knockout CTLA4 alleles in cells of a subject, thereby improving the performance of the cells, or cells derived therefrom, in adoptive transfer therapies.

[0116] CTLA4 editing strategies include, but are not limited to, biallelic knockout by targeting any one of, or a combination of, Exons 1-4, including within thirty nucleotides upstream and downstream of the exons to flank splice donor and acceptor sites, as frameshifts in these exons lead to non-functional, truncated CTLA4 proteins or non-sense mediated decay of the mutated CTLA4 transcripts.

### CRISPR Nucleases and PAM Recognition

[0117] In some embodiments, the sequence specific nuclease is selected from CRISPR nucleases, or is a functional variant thereof. In some embodiments, the sequence specific nuclease is an RNA guided DNA nuclease. In such embodiments, the RNA sequence which guides the RNA guided DNA nuclease (e.g., Cpf1) binds to and/or directs the RNA guided DNA nuclease to all CTLA4 alleles in a cell. In some embodiments, the CRISPR complex does not further comprise a tracrRNA. A skilled artisan will appreciate that RNA molecules can be engineered to bind to a target of choice in a genome by commonly known methods in the art.

[0118] The term “PAM” as used herein refers to a nucleotide sequence of a target DNA located in proximity to the targeted DNA sequence and recognized by the CRISPR nuclease complex. The PAM sequence may differ depending on the nuclease identity. In addition, there are CRISPR nucleases that can target almost all PAMs. In some embodiments of the present invention, a CRISPR system utilizes one or more RNA molecules having a guide sequence portion to direct a CRISPR nuclease to a target DNA site via Watson-Crick base-pairing between the guide sequence portion and the protospacer on the target DNA site, which is next to the protospacer adjacent motif (PAM), which is an additional requirement for target recognition. The CRISPR nuclease then mediates cleavage of the target DNA site to create a double-stranded break within the protospacer. In a non-limiting example, a type II CRISPR system utilizes a mature crRNA:tracrRNA complex that directs the CRISPR nuclease, e.g. Cas9 to the target DNA the target DNA via Watson-Crick base-pairing between the guide sequence portion of the crRNA and the protospacer on the target DNA next to the protospacer adjacent motif (PAM). A skilled artisan will appreciate that each of the engineered RNA molecule of the present invention is further designed such as to associate with a target genomic DNA sequence of interest next to a protospacer adjacent motif (PAM), e.g., a PAM matching the sequence relevant for the type of CRISPR nuclease utilized, such as for a non-limiting example, NGG or NAG, wherein “N” is any nucleobase, for Streptococcus pyogenes Cas9 WT (SpCAS9); NNGRRT for Staphylococcus aureus (SaCas9); NNNVRYM for Jejuni Cas9 WT; NGAN or NGNG for SpCas9-VQR variant; NGCG for SpCas9-VRER variant; NGAG for SpCas9-EQR variant; NRRH for SpCas9-NRRH variant, wherein N is any nucleobase, R is A or G and H is A, C, or T; NRTH for SpCas9-NRTH variant, wherein N is any nucleobase, R is A or G and H is A, C, or T; NRCH for SpCas9-NRCH variant, wherein N is any nucleobase, R is A or G and H is A, C, or T; NG for SpG variant of SpCas9 wherein N is any nucleobase; NG or NA for SpCas9-NG variant of SpCas9 wherein N is any nucleobase; NR or NRN or NYN for SpRY variant of SpCas9, wherein N is any nucleobase, R is A or G and Y is C or T; NNG for Streptococcus canis Cas9 variant (ScCas9), wherein N is any nucleobase; NNNRRT for SaKKH-Cas9 variant of Staphylococcus aureus (SaCas9), wherein N is any nucleobase, and R is A or G; NNNNGATT for Neisseria meningitidis (NmCas9), wherein N is any nucleobase; TTN for Alicyclobacillus acidiphilus Cas12b (AacCas12b), wherein N is any nucleobase; or TTTV for Cpf1, wherein V is A, C or G. RNA molecules of the present invention are each designed to form complexes in conjunction with one or more different CRISPR nucleases and designed to target polynucleotide sequences of interest utilizing one or more different PAM sequences respective to the CRISPR nuclease utilized.

[0119] In some embodiments, an RNA-guided DNA nuclease e.g., a CRISPR nuclease, may be used to cause a DNA break, either double or single-stranded in nature, at a desired location in the genome of a cell. The most commonly used RNA-guided DNA nucleases are derived from CRISPR systems, however, other RNA-guided DNA nucleases are also contemplated for use in the genome editing compositions and methods described herein. For instance, see U.S. Patent Publication No. 2015/0211023, incorporated herein by reference.

[0120] CRISPR systems that may be used in the practice of the invention vary greatly. CRISPR systems can be a type I, a type II, or a type III system. Non-limiting examples of suitable CRISPR proteins include Cas3, Cas4, Cas5, Cas5e (or CasD), Cas6, Cashe, Cas6f, Cas7, Cas8a1, Cas8a2, Cas8b, Cas8c, Cas9, Cas10, Cas1 Od, CasF, CasG, CasH, Csy1, Csy2, Csy3, Cse1 (or CasA), Cse2 (or CasB), Cse3 (or CasE), Cse4 (or CasC), Csc1, Csc2, Csa5, Csn2, Csm2, Csm3, Csm4, Csm5, Csm6, Cmr1, Cmr3, Cmr4, Cmr5, Cmr6, Csb1, Csb2, Csb3, Csx17, Csx14, Csx10, Csx16, CsaX, Csx3, Csz1, Csx15, Csf1, Csf2, Csf3, Csf4, and Cul966.

[0121] In some embodiments, the RNA-guided DNA nuclease is a CRISPR nuclease derived from a type II CRISPR system (e.g., Cas9). The CRISPR nuclease may be derived from Streptococcus pyogenes, Streptococcus thermophilus, Streptococcus sp., Staphylococcus aureus, Neisseria meningitidis, Treponema denticola, Nocardiopsis dassonvillei, Streptomyces pristinaespiralis, Streptomyces viridochromogenes, Streptomyces viridochromogenes, Streptosporangium roseum, Streptosporangium roseum, Alicyclobacillus acidocaldarius, Bacillus pseudomycoides, Bacillus selenitireducens, Exiguobacterium sibiricum, Lactobacillus delbrueckii, Lactobacillus salivarius, Microscilla marina, Burkholderiales bacterium, Polaromonas naphthalenivorans, Polaromonas sp., Crocosphaera watsonii, Cyanothece sp., Microcystis aeruginosa, Synechococcus sp., Acetohalobium arabaticum, Ammonifex degensii, Caldicelulosiruptor becscii, Candidatus Desulforudis, Clostridium botulinum, Clostridium difficile, Finegoldia magna, Natranaerobius thermophilus, Pelotomaculumthermopropionicum, Acidithiobacillus caldus, Acidithiobacillus ferrooxidans, Allochromatium vinosum, Marinobacter sp., Nitrosococcus halophilus, Nitrosococcus watsoni, Pseudoalteromonas haloplanktis, Ktedonobacter racemifer, Methanohalobium evestigatum, Anabaena variabilis, Nodularia spumigena, Nostoc sp., Arthrospira maxima, Arthrospira platensis, Arthrospira sp., Lyngbya sp., Microcoleus chthonoplastes, Oscillatoria sp., Petrotoga mobilis, Thermosipho africanus, Acaryochloris marina, or any species which encodes a CRISPR nuclease with a known PAM sequence. CRISPR nucleases encoded by uncultured bacteria may also be used in the context of the invention. (See Burstein et al. Nature, 2017). Variants of CRIPSR proteins having known PAM sequences e.g., SpCas9 D1135E variant, SpCas9 VQR variant, SpCas9 EQR variant, or SpCas9 VRER variant may also be used in the context of the invention.

[0122] Thus, an RNA guided DNA nuclease of a CRISPR system, such as a Cas9 protein or modified Cas9 or homolog or ortholog of Cas9, or other RNA guided DNA nucleases belonging to other types of CRISPR systems, such as Cpf1 and its homologs and orthologs, may be used in the compositions of the present invention. Additional CRISPR nucleases may also be used, for example, the nucleases described in PCT International Application Publication Nos. WO2020/223514 and WO2020/223553, which are hereby incorporated by reference.

[0123] In certain embodiments, the CRIPSR nuclease may be a “functional derivative” of a naturally occurring Cas protein. A “functional derivative” of a native sequence polypeptide is a compound having a qualitative biological property in common with a native sequence polypeptide. “Functional derivatives” include, but are not limited to, fragments of a native sequence and derivatives of a native sequence polypeptide and its fragments, provided that they have a biological activity in common with a corresponding native sequence polypeptide. A biological activity contemplated herein is the ability of the functional derivative to hydrolyze a DNA substrate into fragments. The term “derivative” encompasses both amino acid sequence variants of polypeptide, covalent modifications, and fusions thereof. Suitable derivatives of a Cas polypeptide or a fragment thereof include but are not limited to mutants, fusions, covalent modifications of Cas protein or a fragment thereof. Derivatives include, but are not limited to, CRISPR nickases, catalytically inactive or “dead” CRISPR nucleases, and fusion of a CRISPR nuclease or derivative thereof to other enzymes such as base editors or retrotransposons. See for example, Anzalone et al. (2019) and PCT International Application No. PCT/US2020/037560.

[0124] In some embodiments, the CRISPR nuclease or derivative thereof may be fused to a protein that has an enzymatic activity. In some embodiments, the enzymatic activity modifies a target DNA. In some embodiments, the enzymatic activity is nuclease activity, methyltransferase activity, demethylase activity, DNA repair activity, DNA damage activity, deamination activity, dismutase activity, alkylation activity, depurination activity, oxidation activity, pyrimidine dimer forming activity, integrase activity, transposase activity, recombinase activity, polymerase activity, ligase activity, helicase activity, photolyase activity or glycosylase activity. In some cases, the enzymatic activity is nuclease activity. In some cases, the nuclease activity introduces a double strand break in the target DNA. In some cases, the enzymatic activity modifies a target polypeptide associated with the target DNA. In some cases, the enzymatic activity is methyltransferase activity, demethylase activity, acetyltransferase activity, deacetylase activity, kinase activity, phosphatase activity, ubiquitin ligase activity, deubiquitinating activity, adenylation activity, deadenylation activity, SUMOylating activity, deSUMOylating activity, ribosylation activity, deribosylation activity, myristoylation activity or demyristoylation activity. In some cases, the target polypeptide is a histone and the enzymatic activity is methyltransferase activity, demethylase activity, acetyltransferase activity, deacetylase activity, kinase activity, phosphatase activity, ubiquitin ligase activity or deubiquitinating activity.

[0125] Cas protein, which includes Cas protein or a fragment thereof, as well as derivatives of Cas protein or a fragment thereof, may be obtainable from a cell or synthesized chemically or by a combination of these two procedures. The cell may be a cell that naturally produces Cas protein, or a cell that naturally produces Cas protein and is genetically engineered to produce the endogenous Cas protein at a higher expression level or to produce a Cas protein from an exogenously introduced nucleic acid, which nucleic acid encodes a Cas that is same or different from the endogenous Cas. In some cases, the cell does not naturally produce Cas protein and is genetically engineered to produce a Cas protein.

[0126] In some embodiments, the CRISPR nuclease is Cpf1. Cpf1 is a single RNA-guided endonuclease which utilizes a T-rich protospacer-adjacent motif. Cpf1 cleaves DNA via a staggered DNA double-stranded break. Two Cpf1 enzymes from Acidaminococcus and Lachnospiraceae have been shown to carry out efficient genome-editing activity in human cells. (See Zetsche et al., 2015).

[0127] Thus, an RNA guided DNA nuclease of a Type II CRISPR System, such as a Cas9 protein or modified Cas9 or homologs, orthologues, or variants of Cas9, or other RNA guided DNA nucleases belonging to other types of CRISPR systems, such as Cpf1 and its homologs, orthologues, or variants, may be used in the present invention.

[0128] In some embodiments, the guide molecule comprises one or more chemical modifications which imparts a new or improved property (e.g., improved stability from degradation, improved hybridization energetics, or improved binding properties with an RNA guided DNA nuclease). Suitable chemical modifications include, but are not limited to: modified bases, modified sugar moieties, or modified inter-nucleoside linkages. Non-limiting examples of suitable chemical modifications include: 4-acetylcytidine, 5-(carboxyhydroxymethyl) uridine, 2′-O-methylcytidine, 5-carboxymethylaminomethyl-2-thiouridine, 5-carboxymethylaminomethyluridine, dihydrouridine, 2′-O-methylpseudouridine. “beta, D-galactosylqueuosine”, 2′-O-methylguanosine, inosine, N6-isopentenyladenosine, 1-methyladenosine, 1-methylpseudouridine, 1-methylguanosine, 1-methylinosine, “2,2-dimethylguanosine”, 2-methyladenosine, 2-methylguanosine, 3-methylcytidine, 5-methylcytidine, N6-methyladenosine, 7-methylguanosine, 5-methylaminomethyluridine, 5-methoxyaminomethyl-2-thiouridine, “beta, D-mannosylqueosine”, 5-methoxycarbonylmethyl-2-thiouridine, 5-methoxycarbonylmethyluridine, 5-methoxyuridine, 2-methylthio-N6-isopentenyladenosine, N-((9-beta-D-ribofuranosyl-2-methylthiopurine-6-yl) carbamoyl) threonine, N-((9-beta-D-ribofuranosylpurine-6-yl)N-methylcarbamoyl) threonine, uridine-5-oxyacetic acid-methylester, uridine-S-oxyacetic acid, wybutoxosine, queuosine, 2-thiocytidine, 5-methyl-2-thiouridine, 2-thiouridine, 4-thiouridine, 5-methyluridine, N-((9-beta-D-ribofuranosylpurine-6-yl)-carbamoyl) threonine, 2′-O-methyl-5-methyluridine, 2′-O-methyluridine, wybutosine, “3-(3-amino-3-carboxy-propyl) uridine, (acp3)u”, 2′-O-methyl (M), 3′-phosphorothioate (MS), 3′-thioPACE (MSP), pseudouridine, or 1-methyl pseudo-uridine. Each possibility represents a separate embodiment of the present invention.

[0129] In addition to targeting CTLA4 alleles by a RNA-guided CRISPR nuclease, other means of inhibiting CTLA4 expression in a target cell include but are not limited to use of a gapmer, shRNA, siRNA, a customized TALEN, meganuclease, or zinc finger nuclease, a small molecule inhibitor, and any other method known in the art for reducing or eliminating expression of a gene in a target cell. See, for example, U.S. Pat. Nos. 6,506,559; 7,560,438; 8,420,391; 8,552,171; 7,056,704; 7,078,196; 8,362,231; 8,372,968; 9,045,754; and PCT International Publication Nos. WO/2004/067736; WO/2006/097853; WO/2003/087341; WO/2000/0415661; WO/2003/080809; WO/2010/079430; WO/2010/079430; WO/2011/072246; WO/2018/057989; and WO/2017/164230, the entire contents of each of which are incorporated herein by reference.

[0130] Advantageously, the guide RNA molecules presented herein provide improved CTLA4 knockout efficiency when complexed with a CRISPR nuclease in a cell relative to other guide RNA molecules. These specifically designed sequences may also be useful for identifying CTLA4 target sites for other nucleotide targeting-based gene-editing or gene-silencing methods, for example, siRNA, TALENs, meganucleases or zinc-finger nucleases.

### Delivery to Cells

[0131] Any one of the compositions described herein may be delivered to a target cell by any suitable means. RNA molecule compositions of the present invention may be targeted to any cell which contains and/or expresses a CTLA4 allele, such as a mammalian lymphocyte or stem cell. For example, in one embodiment the RNA molecule specifically targets CTLA4 alleles in a target cell and the target cell is a lymphocyte, a T cell, a T regulatory cell, a B cell, a natural killer (NK) cell, a macrophage, a stem cell, or a fibroblast, blood cell, hepatocyte, keratinocyte, or any other cell type capable of being reprogrammed to an induced pluripotent stem cell (iPSC). The delivery to the cell may be performed in vivo, ex vivo, or in vitro. Further, the nucleic acid compositions described herein may be delivered to a cell as one or more of DNA molecules, RNA molecules, ribonucleoproteins (RNP), nucleic acid vectors, or any combination thereof.

[0132] In some embodiments, the RNA molecule comprises a chemical modification. Non-limiting examples of suitable chemical modifications include 2′-O-methyl (M), 2′-O-methyl, 3′phosphorothioate (MS) or 2′-O-methyl, 3′thioPACE (MSP), pseudouridine, and 1-methyl pseudo-uridine. Each possibility represents a separate embodiment of the present invention.

[0133] In some embodiments, any one of the compositions described herein is delivered to a cell in-vivo. The composition may be delivered to the cell by any known in-vivo delivery method, including but not limited to, viral transduction, for example, using a lentivirus or adeno-associated virus (AAV), nanoparticle delivery, etc. Additional detailed delivery methods are described throughout this section.

[0134] In some embodiments, any one of the compositions described herein is delivered to a cell ex-vivo. The composition may be delivered to the cell by any known ex-vivo delivery method, including but not limited to, nucleofection, electroporation, viral transduction, for example, using a lentivirus or adeno-associated virus (AAV), nanoparticle delivery, liposomes, etc. Additional detailed delivery methods are described throughout this section.

[0135] Any suitable viral vector system may be used to deliver nucleic acid compositions e.g., the RNA molecule compositions of the subject invention. Conventional viral and non-viral based gene transfer methods can be used to introduce nucleic acids and target tissues. In certain embodiments, nucleic acids are administered for in vivo or ex vivo gene therapy uses. Non-viral vector delivery systems include naked nucleic acid, and nucleic acid complexed with a delivery vehicle such as a liposome or poloxamer. For a review of gene therapy procedures, see Anderson (1992); Nabel & Felgner (1993); Mitani & Caskey (1993); Dillon (1993); Miller (1992); Van Brunt (1988); Vigne (1995); Kremer & Perricaudet (1995); Haddada et al. (1995); and Yu et al. (1994).

[0136] Methods of non-viral delivery of nucleic acids and/or proteins include electroporation, lipofection, microinjection, biolistics, particle gun acceleration, virosomes, liposomes, immunoliposomes, lipid nanoparticles (LNPs), polycation or lipid:nucleic acid conjugates, artificial virions, and agent-enhanced uptake of nucleic acids or can be delivered to plant cells by bacteria or viruses (e.g., Agrobacterium, Rhizobium sp. NGR234, Sinorhizoboiummeliloti, Mesorhizobium loti, tobacco mosaic virus, potato virus X, cauliflower mosaic virus and cassava vein mosaic virus). (See, e.g., Chung et al., 2006). Sonoporation using, e.g., the Sonitron 2000 system (Rich-Mar), can also be used for delivery of nucleic acids. Cationic-lipid mediated delivery of proteins and/or nucleic acids is also contemplated as an in vivo, ex vivo, or in vitro delivery method. (See Zuris et al. (2015); see also Coelho et al. (2013); Judge et al. (2006); and Basha et al. (2011)).

[0137] Non-viral vectors, such as transposon-based systems e.g. recombinant Sleeping Beauty transposon systems or recombinant PiggyBac transposon systems, may also be delivered to a target cell and utilized for transposition of a polynucleotide sequence of a molecule of the composition or a polynucleotide sequence encoding a molecule of the composition in the target cell.

[0138] Additional exemplary nucleic acid delivery systems include those provided by Amaxa® Biosystems (Cologne, Germany), Maxcyte, Inc. (Rockville, Md.), BTX Molecular Delivery Systems (Holliston, Mass.) and Copernicus Therapeutics Inc., (see, e.g., U.S. Pat. No. 6,008,336). Lipofection is described in e.g., U.S. Pat. Nos. 5,049,386, 4,946,787; and 4,897,355, and lipofection reagents are sold commercially (e.g., Transfectam™, Lipofectin™ and Lipofectamine™ RNAiMAX). Cationic and neutral lipids that are suitable for efficient receptor-recognition lipofection of polynucleotides include those disclosed in PCT International Publication Nos. WO/1991/017424 and WO/1991/016024. Delivery can be to cells (ex vivo administration) or target tissues (in vivo administration).

[0139] The preparation of lipid:nucleic acid complexes, including targeted liposomes such as immunolipid complexes, is well known to one of skill in the art (see, e.g., Crystal, Science (1995); Blaese et al., (1995); Behr et al., (1994); Remy et al. (1994); Gao and Huang (1995); Ahmad and Allen (1992); U.S. Pat. Nos. 4,186,183; 4,217,344; 4,235,871; 4,261,975; 4,485,054; 4,501,728; 4,774,085; 4,837,028; and 4,946,787).

[0140] Additional methods of delivery include the use of packaging the nucleic acids to be delivered into EnGeneIC delivery vehicles (EDVs). These EDVs are specifically delivered to target tissues using bispecific antibodies where one arm of the antibody has specificity for the target tissue and the other has specificity for the EDV. The antibody brings the EDVs to the target cell surface and then the EDV is brought into the cell by endocytosis. Once in the cell, the contents are released (See MacDiarmid et al., 2009).

[0141] Delivery vehicles include, but are not limited to, bacteria, preferably non-pathogenic, vehicles, nanoparticles, exosomes, microvesicles, gene gun delivery, for example, by attachment of a composition to a gold particle which is fired into a cell using via a “gene-gun”, viral vehicles, including but not limited to lentiviruses, AAV, and retroviruses), virus-like particles (VLPs). large VLPs (LVLPs), lentivirus-like particles, transposons, viral vectors, naked vectors, DNA, or RNA, among other delivery vehicles known in the art.

[0142] The delivery of a CRISPR nuclease and/or a polynucleotide encoding the CRIPSR nuclease, and optionally additional nucleotide molecules and/or additional proteins or peptides, may be performed by utilizing a single delivery vehicle or method or a combination of different delivery vehicles or methods. For example, a CRISPR nuclease may be delivered to a cell utilizing an LNP, and a crRNA molecule and tracrRNA molecule may be delivered to the cell utilizing AAV. Alternatively, a CRISPR nuclease may be delivered to a cell utilizing an AAV particle, and a crRNA molecule and tracrRNA molecule may be delivered to the cell utilizing a separate AAV particle, which may be advantageous due to size limitations.

[0143] The use of RNA or DNA viral based systems for viral mediated delivery of nucleic acids take advantage of highly evolved processes for targeting a virus to specific cells in the body and trafficking the viral payload to the nucleus. Viral vectors can be administered directly to patients (in vivo) or they can be used to treat cells in vitro and the modified cells are administered to patients (ex vivo). Conventional viral based systems for the delivery of nucleic acids include, but are not limited to, retroviral, lentivirus, adenoviral, adeno-associated, vaccinia and herpes simplex virus vectors for gene transfer. An RNA virus may be utilized for delivery of the compositions described herein. Additionally, high transduction efficiencies have been observed in many different cell types and target tissues. Nucleic acid of the invention may be delivered by non-integrating lentivirus. Optionally, RNA delivery with Lentivirus is utilized. Optionally the lentivirus includes mRNA of the nuclease and a guide RNA molecule. Optionally, the lentivirus includes the nuclease protein and a guide RNA molecule. Optionally the lentivirus includes mRNA of the nuclease, a guide RNA molecule, and a tracrRNA molecule. Optionally, the lentivirus includes the nuclease protein, a guide RNA molecule, and a tracrRNA molecule.

[0144] The tropism of a retrovirus can be altered by incorporating foreign envelope proteins, expanding the potential target population of target cells. Lentiviral vectors are retroviral vectors that are able to transduce or infect non-dividing cells and typically produce high viral titers. Selection of a retroviral gene transfer system depends on the target tissue. Retroviral vectors are comprised of cis-acting long terminal repeats with packaging capacity for up to 6-10 kb of foreign sequence. The minimum cis-acting LTRs are sufficient for replication and packaging of the vectors, which are then used to integrate the therapeutic gene into the target cell to provide permanent transgene expression. Widely used retroviral vectors include those based upon murine leukemia virus (MuLV), gibbon ape leukemia virus (GaLV), Simian Immunodeficiency virus (SIV), human immunodeficiency virus (HIV), and combinations thereof (See, e.g., Buchschacher et al. (1992); Johann et al. (1992); Sommerfelt et al. (1990); Wilson et al. (1989); Miller et al. (1991); PCT International Publication No. WO/1994/026877A1).

[0145] At least six viral vector approaches are currently available for gene transfer in clinical trials, which utilize approaches that involve complementation of defective vectors by genes inserted into helper cell lines to generate the transducing agent.

[0146] pLASN and MFG-S are examples of retroviral vectors that have been used in clinical trials (See Dunbar et al., 1995; Kohn et al., 1995; Malech et al., 1997). PA317/pLASN was the first therapeutic vector used in a gene therapy trial (Blaese et al., 1995). Transduction efficiencies of 50% or greater have been observed for MFG-S packaged vectors. (Ellem et al., (1997); Dranoff et al., 1997).

[0147] Packaging cells are used to form virus particles that are capable of infecting a host cell. Such cells include 293 cells, which package adenovirus, AAV, and Psi-2 cells or PA317 cells, which package retrovirus. Viral vectors used in gene therapy are usually generated by a producer cell line that packages a nucleic acid vector into a viral particle. The vectors typically contain the minimal viral sequences required for packaging and subsequent integration into a host (if applicable), other viral sequences being replaced by an expression cassette encoding the protein to be expressed. The missing viral functions are supplied in trans by the packaging cell line. For example, AAV vectors used in gene therapy typically only possess inverted terminal repeat (ITR) sequences from the AAV genome which are required for packaging and integration into the host genome. Viral DNA is packaged in a cell line, which contains a helper plasmid encoding the other AAV genes, namely rep and cap, but lacking ITR sequences. The cell line is also infected with adenovirus as a helper. The helper virus promotes replication of the AAV vector and expression of AAV genes from the helper plasmid. The helper plasmid is not packaged in significant amounts due to a lack of ITR sequences. Contamination with adenovirus can be reduced by, e.g., heat treatment to which adenovirus is more sensitive than AAV. Additionally, AAV can be produced at clinical scale using baculovirus systems (see U.S. Pat. No. 7,479,554).

[0148] In many gene therapy applications, it is desirable that the gene therapy vector be delivered with a high degree of specificity to a particular tissue type. Accordingly, a viral vector can be modified to have specificity for a given cell type by expressing a ligand as a fusion protein with a viral coat protein on the outer surface of the virus. The ligand is chosen to have affinity for a receptor known to be present on the cell type of interest. For example, Han et al. (1995) reported that Moloney murine leukemia virus can be modified to express human heregulin fused to gp70, and the recombinant virus infects certain human breast cancer cells expressing human epidermal growth factor receptor. This principle can be extended to other virus-target cell pairs, in which the target cell expresses a receptor and the virus expresses a fusion protein comprising a ligand for the cell-surface receptor. For example, filamentous phage can be engineered to display antibody fragments (e.g., FAB or Fv) having specific binding affinity for virtually any chosen cellular receptor. Although the above description applies primarily to viral vectors, the same principles can be applied to nonviral vectors. Such vectors can be engineered to contain specific uptake sequences which favor uptake by specific target cells.

[0149] Gene therapy vectors can be delivered in vivo by administration to an individual patient, for example by systemic administration (e.g., intravitreal, intravenous, intraperitoneal, intramuscular, subdermal, or intracranial infusion) or topical application.

[0150] Alternatively, vectors can be delivered to cells ex vivo, such as cells explanted from an individual patient (e.g., lymphocytes, bone marrow aspirates, tissue biopsy) or universal donor hematopoietic stem cells, followed by reimplantation of the cells into a patient, optionally after selection for cells which have incorporated the vector. A non-limiting exemplary ex vivo approach may involve removal of tissue (e.g., peripheral blood, bone marrow, and spleen) from a patient for culture, nucleic acid transfer to the cultured cells (e.g., hematopoietic stem cells), followed by grafting the cells to a target tissue (e.g., bone marrow, and spleen) of the patient. In some embodiments, the stem cell or hematopoietic stem cell may be further treated with a viability enhancer.

[0151] Ex vivo cell transfection for diagnostics, research, or for gene therapy (e.g., via re-infusion of the transfected cells into the host organism) is well known to those of skill in the art. In a preferred embodiment, cells are isolated from the subject organism, transfected with a nucleic acid composition, and re-infused back into the subject organism (e.g., patient). Various cell types suitable for ex vivo transfection are well known to those of skill in the art (See, e.g., Freshney, “Culture of Animal Cells, A Manual of Basic Technique and Specialized Applications (6th edition, 2010) and the references cited therein for a discussion of how to isolate and culture cells from patients).

[0152] Vectors (e.g., retroviruses, liposomes, etc.) containing therapeutic nucleic acid compositions can also be administered directly to an organism for transduction of cells in vivo. Administration is by any of the routes normally used for introducing a molecule into ultimate contact with blood or tissue cells including, but not limited to, injection, infusion, topical application (e.g., eye drops and cream) and electroporation. Suitable methods of administering such nucleic acids are available and well known to those of skill in the art, and, although more than one route can be used to administer a particular composition, a particular route can often provide a more immediate and more effective reaction than another route. According to some embodiments, the composition is delivered via IV injection.

[0153] Vectors suitable for introduction of transgenes into immune cells (e.g., T-cells) include non-integrating lentivirus vectors. See, e.g., U.S. Patent Publication No. 2009/0117617.

[0154] As mentioned above, the compositions described herein may be delivered to a target cell using a non-integrating lentiviral particle method, e.g. a LentiFlash® system. Such a method may be used to deliver mRNA or other types of RNAs into the target cell, such that delivery of the RNAs to the target cell results in assembly of the compositions described herein inside of the target cell. See also PCT International Publication Nos. WO/2013/014537, WO/2014/016690, WO/2016/185125, WO/2017/194902, and WO/2017/194903.

[0155] Pharmaceutically acceptable carriers are determined in part by the particular composition being administered, as well as by the particular method used to administer the composition. Accordingly, there is a wide variety of suitable formulations of pharmaceutical compositions available, as described below (See, e.g., Remington's Pharmaceutical Sciences, 17th ed., 1989).

Examples of RNA Guide Sequences which Specifically Target Alleles of CTLA4 Gene

[0156] Although a large number of guide sequences can be designed to target the CTLA4 gene, the nucleotide sequences described in Table 2 and are identified by SEQ ID NOs: 1-4886 were specifically selected to effectively implement the methods set forth herein.

[0157] Table 2 lists guide sequences designed for use as described in the embodiments above to associate specific sequences within a CTLA4 allele. Each engineered guide molecule is further designed such as to associate with a target genomic DNA sequence of interest that lies next to a protospacer adjacent motif (PAM), e.g., a PAM matching the sequence NGG or NAG, where “N” is any nucleobase. The guide sequences were designed to work in conjunction with one or more different CRISPR nucleases, including, but not limited to, e.g. SpCas9WT (PAM SEQ: NGG), SpCas9.VQR.1 (PAM SEQ: NGAN), SpCas9.VQR.2 (PAM SEQ: NGNG), SpCas9.EQR (PAM SEQ: NGAG), SpCas9.VRER (PAM SEQ: NGCG), SaCas9WT (PAM SEQ: NNGRRT), SpRY (PAM SEQ: NRN or NYN), NmCas9WT (PAM SEQ: NNNNGATT), Cpf1 (PAM SEQ: TTTV), JeCas9WT (PAM SEQ: NNNVRYM), OMNI-50 (PAM SEQ: NGG), OMNI-79 (PAM SEQ: NGG), OMNI-103 (PAM SEQ: NNRACT), OMNI-159 (NNNNCMAN), or OMNI-124 (PAM SEQ: NNGNRMNN).

[0158] Additional description of OMNI CRISPR nucleases is provided in PCT International Application Publication No. WO 2023/019269 A2, PCT International Application Publication Nos. WO 2022/170199 A2 and WO 2023/107946 A2, U.S. Pat. No. 11,666,641 B2 and PCT International Application Publication Nos. WO 2020/223514 A2, WO 2022/098693 A1, and WO 2023/019263 A1, U.S. Application Publication No. 2023/0122086 A1 and PCT International Application Publication Nos. WO 2021/248016 A2 and WO 2023/102407 A2, PCT International Application Publication No. WO 2022/087135 A1, and PCT International Application Publication No. WO 2022/226215 A1, the contents of each of which are hereby incorporated by reference.

[0159] RNA molecules of the present invention are each designed to form complexes in conjunction with one or more different CRISPR nucleases and designed to target polynucleotide sequences of interest utilizing one or more different PAM sequences respective to the CRISPR nuclease utilized.

[0160] As used herein, the following nucleotide identifiers are used to represent a referenced nucleotide base(s):

TABLE 1

| Nucleotide | |
|---|---|
| reference | Base(s) represented |

| | | | | |
|---|---|---|---|---|
| A | A | | | |
| C | | C | | |
| G | | | G | |
| T | | | | T |
| W | A | | | T |
| S | | C | G | |
| M | A | C | | |
| K | | | G | T |
| R | A | | G | |
| Y | | C | | T |
| B | | C | G | T |
| D | A | | G | T |
| H | A | C | | T |
| V | A | C | G | |
| N | A | C | G | T |

TABLE 2
Guide sequence portions designed to associate
with specific CTLA4 gene targets

| | SEQ ID NOs: | SEQ ID NOs: | SEQ ID NOs: |
|---|---|---|---|
| | of 20 base | of 21 base | of 22 base |
| Target | guides | guides | guides |
| 2:203867904- | 1-318 | 319-634 | 635-948 |
| 203868089 Exon 1, | | | |
| including 30 nt | | | |
| upstream and 30 nt | | | |
| downstream of the | | | |
| exon | | | |
| 2:203870547- | 949-1744 | 1745-2538 | 2539-3330 |
| 203870971 Exon 2, | | | |
| including 30 nt | | | |
| upstream and 30 nt | | | |
| downstream of the | | | |
| exon | | | |
| 2:203871339- | 3331-3552 | 3553-3778 | 3779-4008 |
| 203871525 Exon 3, | | | |
| including 30 nt | | | |
| upstream and 30 nt | | | |
| downstream of the | | | |
| exon | | | |
| 2:203872669- | 4009-4309 | 4310-4592 | 4593-4885 |
| 203872850 Exon 4, | | | |
| including 30 nt | | | |
| upstream and 30 nt | | | |
| downstream of the | | | |
| exon | | | |

The indicated locations listed in column 1 of the Table 2 are based on gnomAD v3 database and UCSC Genome Browser assembly ID: hg38, Sequencing/Assembly provider ID: Genome Reference Consortium Human GRCh38.p12 (GCA_000001405.27). Assembly date: December 2013 initial release; December 2017 patch release 12.

[0161] Examples are provided below to facilitate a more complete understanding of the invention. The following examples illustrate the exemplary modes of making and practicing the invention. However, the scope of the invention is not limited to specific embodiments disclosed in these Examples, which are for purposes of illustration only.

### EXPERIMENTAL DETAILS

### Example 1: CTLA4 Modification Analysis

[0162] Guide sequences comprising 17-50 contiguous nucleotides containing nucleotides in the sequence set forth in any one of SEQ ID NOs: 1-4886 are screened for high on-target activity using a CRISPR nuclease in T cells. On-target activity is determined by DNA capillary electrophoresis analysis.

### Example 2: CTLA4 Editing in HeLa and Primary T Cells

[0163] CTLA4 editing in HeLa cells and primary T cells using a subset of the disclosed CTLA4-targeting guide sequence portions are shown in FIG. 1 and FIG. 2.

[0164] A summary table of the CTLA4 editing data is shown below:

TABLE 3

| | | | % editing | % editing |
|---|---|---|---|---|
| Target | | | NGS | NGS |
| Site | Spacer Name | Guide Sequence Portion | (HeLa) | (T cells) |
| 4 | hCTLA4_S4_22 bp_II | GCUUCGGCAGGCUGACAGCCAG | 49.36 | 75.16 |
| | | (SEQ ID NO: 3033) | | |
| 5 | hCTLA4_S5_22 bp_II | CCCCAUCAUGUAGGUUGCCGCA | 43.98 | |
| | | (SEQ ID NO: 2824) | | |
| 6 | hCTLA4_S6_22 bp_II | CAGAUGGAAUCAUCUAGGAAGG | 43.83 | |
| | | (SEQ ID NO: 2752) | | |
| 9 | hCTLA4_S9_22 bp_II | AUCAAGUGAACCUCACUAUCCA | 58.56 | 56.83 |
| | | (SEQ ID NO: 2678) | | |
| 10 | hCTLA4_S10_22 bp_II | AAGGACUGAGGGCCAUGGACAC | 44.72 | 66.64 |
| | | (SEQ ID NO: 2557) | | |
| 12 | hCTLA4_S12_22 bp_II | GAUCCAGAACCGUGCCCAGAUU | 59.18 | |
| | | (SEQ ID NO: 3907) | | |
| 13 | hCTLA4_S13_22 bp_II | GCUAUAAAAAAACAACCCCGAA | 29.31 | |
| | | (SEQ ID NO: 4886) | | |

[0165] OMNI-103 related sequences are provided in the table below:

TABLE 4

| | | OMNI-103 DNA | |
|---|---|---|---|
| | | sequence codon | |
| OMNI-103 | | optimized for | |
| Amino Acid | OMNI-103 DNA | expression in | OMNI-103 sgRNA |
| Sequence | sequence | human cells | scaffold sequence |
| SEQ ID NO: | SEQ ID NO: | SEQ ID NO: | SEQ ID NO: |
| 4892 | 4893 | 4894 | 4895 |

### REFERENCES

[0166] 1. Ahmad and Allen (1992) “Antibody-mediated Specific Binging and Cytotoxicity of Lipsome-entrapped Doxorubicin to Lung Cancer Cells in Vitro”, Cancer Research 52:4817-20.
[0167] 2. Anderson (1992) “Human gene therapy”, Science 256:808-13.
[0168] 3. Anzalone et al. (2019) “Search-and-replace genomme editing without double-strand brakes or donor DNA”, Nature 576, 149-157.
[0169] 4. Basha et al. (2011) “Influence of Cationic Lipid Composition on Gene Silencing Properties of Lipid Nanoparticle Formulations of siRNA in Antigen-Presenting Cells”, Mol. Ther. 19 (12): 2186-200.
[0170] 5. Behr (1994) Gene transfer with synthetic cationic amphiphiles: Prospects for gene therapy”, Bioconjuage Chem 5:382-89.
[0171] 6. Blaese (1995) “Vectors in cancer therapy: how will they deliver”, Cancer Gene Ther. 2:291-97.
[0172] 7. Blaese et al. (1995) “T lympocyte-directed gene therapy for ADA-SCID: initial trial results after 4 years”, Science 270 (5235): 475-80.
[0173] 8. Buchschacher and Panganiban (1992) “Human immunodeficiency virus vectors for inducible expression of foreign genes”, J. Virol. 66:2731-39.
[0174] 9. Burstein et al. (2017) “New CRISPR-Cas systems from uncultivated microbes”, Nature 542:237-41.
[0175] 10. Chang and Wilson (1987) “Modification of DNA ends can decrease end-joining relative to homologous recombination in mammalian cells”, Proc. Natl. Acad. Sci. USA 84:4959-4963.
[0176] 11. Chung et al. (2006) “Agrobacterium is not alone: gene transfer to plants by viruses and other bacteria”, Trends Plant Sci. 11 (1): 1-4.
[0177] 12. Coelho et al. (2013) “Safety and efficacy of RNAi therapy for transthyretin amyloidosis” N. Engl. J. Med. 369, 819-829.
[0178] 13. Collias and Beisel (2021) “CRISPR technologies and the search for the PAM-free nuclease”, Nature Communications 12, 555.
[0179] 14. Crystal (1995) “Transfer of genes to humans: early lessons and obstacles to success”, Science 270 (5235): 404-10.
[0180] 15. Dillon (1993) “Regulation gene expression in gene therapy” Trends in Biotechnology 11 (5): 167-173.
[0181] 16. Dranoff et al. (1997) “A phase I study of vaccination with autologous, irradiated melanoma cells engineered to secrete human granulocyte macrophage colony stimulating factor”, Hum. Gene Ther. 8 (1): 111-23.
[0182] 17. Dunbar et al. (1995) “Retrovirally marked CD34-enriched peripheral blood and bone marrow cells contribute to long-term engraftment after autologous transplantation”, Blood 85:3048-57.
[0183] 18. Ellem et al. (1997) “A case report: immune responses and clinical course of the first human use of ganulocyte/macrophage-colony-stimulating-factor-tranduced autologous melanoma cells for immunotherapy”, Cancer Immunol Immunother 44:10-20.
[0184] 19. Gao and Huang (1995) “Cationic liposome-mediated gene transfer” Gene Ther. 2 (10): 710-22.
[0185] 20. Haddada et al. (1995) “Gene Therapy Using Adenovirus Vectors”, in: The Molecular Repertoire of Adenoviruses III: Biology and Pathogenesis, ed. Doerfler and Böhm, pp. 297-306.
[0186] 21. Han et al. (1995) “Ligand-directed retro-viral targeting of human breast cancer cells”, Proc Natl Acad Sci U.S.A. 92 (21): 9747-51.
[0187] 22. Hu et al. (2018) “Evolved Cas9 variants with broad PAM compatibility and high DNA specificity”, Nature 556 (7699): 57-63.
[0188] 23. Jinek et al. (2012) “A programmable dual-RNA-guided DNA endonuclease in adaptive bacterial immunity,” Science 337 (6096): 816-21.
[0189] 24. Johan et al. (1992) “GLVR1, a receptor for gibbon ape leukemia virus, is homologous to a phosphate permease of Neurospora crassa and is expressed at high levels in the brain and thymus”, J Virol 66 (3): 1635-40.
[0190] 25. Judge et al. (2006) “Design of noninflammatory synthetic siRNA mediating potent gene silencing in vivo”, Mol Ther. 13 (3): 494-505.
[0191] 26. Kohn et al. (1995) “Engraftment of gene-modified umbilical cord blood cells in neonates with adnosine deaminase deficiency”, Nature Medicine 1:1017-23.
[0192] 27. Kremer and Perricaudet (1995) “Adenovirus and adeno-associated virus mediated gene transfer”, Br. Med. Bull. 51 (1): 31-44.
[0193] 28. Macdiarmid et al. (2009) “Sequential treatment of drug-resistant tumors with targeted minicells containing siRNA or a cytotoxic drug”, Nat Biotehcnol. 27 (7): 643-51.
[0194] 29. Malech et al. (1997) “Prolonged production of NADPH oxidase-corrected granulocytes after gene therapy of chronic granulomatous disease”, PNAS 94 (22): 12133-38.
[0195] 30. Miller et al. (1991) “Construction and properties of retrovirus packaging cells based on gibbon ape leukemia virus”, J Virol. 65 (5): 2220-24.
[0196] 31. Miller (1992) “Human gene therapy comes of age”, Nature 357:455-60.
[0197] 32. Mitani and Caskey (1993) “Delivering therapeutic genes-matching approach and application”, Trends in Biotechnology 11 (5): 162-66.
[0198] 33. Nabel and Felgner (1993) “Direct gene transfer for immunotherapy and immunization”, Trends in Biotechnology 11 (5): 211-15.
[0199] 34. Nishimasu et al. (2018) “Engineered CRISPR-Cas9 nuclease with expanded targeting space”, Science 361 (6408): 1259-1262.
[0200] 35. Remy et al. (1994) “Gene Transfer with a Series of Lipphilic DNA-Binding Molecules”, Bioconjugate Chem. 5 (6): 647-54.
[0201] 36. Sentmanat et al. (2018) “A Survey of Validation Strategies for CRISPR-Cas9 Editing”, Scientific Reports 8:888, doi: 10.1038/s41598-018-19441-8.
[0202] 37. Sommerfelt et al. (1990) “Localization of the receptor gene for type D simian retroviruses on human chromosome 19”, J. Virol. 64 (12): 6214-20.
[0203] 38. Van Brunt (1988) “Molecular framing: transgenic animals as bioactors” Biotechnology 6:1149-54.
[0204] 39. Vigne et al. (1995) “Third-generation adenovectors for gene therapy”, Restorative Neurology and Neuroscience 8 (1,2): 35-36.
[0205] 40. Walton et al. (2020) “Unconstrained genome targeting with near-PAMless engineered CRISPR-Cas9 variants”, Science 368 (6488): 290-296.
[0206] 41. Weissman and Kariko (2015) “mRNA: Fulfilling the promise of gene therapy”, Molecular Therapy (9): 1416-7.
[0207] 42. Wilson et al. (1989) “Formation of infectious hybrid virion with gibbon ape leukemia virus and human T-cell leukemia virus retroviral envelope glycoproteins and the gag and pol proteins of Moloney murine leukemia virus”, J. Virol. 63:2374-78.
[0208] 43. Yu et al. (1994) “Progress towards gene therapy for HIV infection”, Gene Ther. 1 (1): 13-26.
[0209] 44. Zetsche et al. (2015) “Cpf1 is a single RNA-guided endonuclease of a class 2 CRIPSR-Cas system” Cell 163 (3): 759-71.
[0210] 45. Zuris et al. (2015) “Cationic lipid-mediated delivery of proteins enables efficient protein based genome editing in vitro and in vivo” Nat Biotechnol. 33 (1): 73-80.

The application's sequence listing, which the Patent Office published only in electronic form, follows.

SEQUENCE LISTING (4895 sequences)

SEQ ID NO: 1 - RNA, 20 nt, synthetic construct
  source 1..20: mol_type = other RNA
aaaaaacaggagagtgcagg

SEQ ID NO: 2 - RNA, 20 nt, synthetic construct
  source 1..20: mol_type = other RNA
aaaaacaggagagtgcaggg

SEQ ID NO: 3 - RNA, 20 nt, synthetic construct
  source 1..20: mol_type = other RNA
aaaacaggagagtgcagggc

SEQ ID NO: 4 - RNA, 20 nt, synthetic construct
  source 1..20: mol_type = other RNA
aaaagtctcactcacctttg

SEQ ID NO: 5 - RNA, 20 nt, synthetic construct
  source 1..20: mol_type = other RNA
aaacaggagagtgcagggcc

SEQ ID NO: 6 - RNA, 20 nt, synthetic construct
  source 1..20: mol_type = other RNA
aaagccatggcttgccttgg

SEQ ID NO: 7 - RNA, 20 nt, synthetic construct
  source 1..20: mol_type = other RNA
aaaggtgagtgagacttttg

SEQ ID NO: 8 - RNA, 20 nt, synthetic construct
  source 1..20: mol_type = other RNA
aaagtctcactcacctttgc

SEQ ID NO: 9 - RNA, 20 nt, synthetic construct
  source 1..20: mol_type = other RNA
aaatccaaggcaagccatgg

SEQ ID NO: 10 - RNA, 20 nt, synthetic construct
  source 1..20: mol_type = other RNA
aacaccgctcccataaagcc

SEQ ID NO: 11 - RNA, 20 nt, synthetic construct
  source 1..20: mol_type = other RNA
aacaggagagtgcagggcca

SEQ ID NO: 12 - RNA, 20 nt, synthetic construct
  source 1..20: mol_type = other RNA
aacctggctaccaggacctg

SEQ ID NO: 13 - RNA, 20 nt, synthetic construct
  source 1..20: mol_type = other RNA
aagaaaaaacaggagagtgc

SEQ ID NO: 14 - RNA, 20 nt, synthetic construct
  source 1..20: mol_type = other RNA
aagacagggatgaagagaag

SEQ ID NO: 15 - RNA, 20 nt, synthetic construct
  source 1..20: mol_type = other RNA
aagacctgaacaccgctccc

SEQ ID NO: 16 - RNA, 20 nt, synthetic construct
  source 1..20: mol_type = other RNA
aagagaagaaaaaacaggag

SEQ ID NO: 17 - RNA, 20 nt, synthetic construct
  source 1..20: mol_type = other RNA
aagccatggcttgccttgga

SEQ ID NO: 18 - RNA, 20 nt, synthetic construct
  source 1..20: mol_type = other RNA
aagccatggctttatgggag

SEQ ID NO: 19 - RNA, 20 nt, synthetic construct
  source 1..20: mol_type = other RNA
aaggcaagccatggctttat

SEQ ID NO: 20 - RNA, 20 nt, synthetic construct
  source 1..20: mol_type = other RNA
aaggctcagctgaacctggc

SEQ ID NO: 21 - RNA, 20 nt, synthetic construct
  source 1..20: mol_type = other RNA
aaggtgagtgagacttttgg

SEQ ID NO: 22 - RNA, 20 nt, synthetic construct
  source 1..20: mol_type = other RNA
aagtctcactcacctttgca

SEQ ID NO: 23 - RNA, 20 nt, synthetic construct
  source 1..20: mol_type = other RNA
aatccaaggcaagccatggc

SEQ ID NO: 24 - RNA, 20 nt, synthetic construct
  source 1..20: mol_type = other RNA
acaaggctcagctgaacctg

SEQ ID NO: 25 - RNA, 20 nt, synthetic construct
  source 1..20: mol_type = other RNA
acaccgctcccataaagcca

SEQ ID NO: 26 - RNA, 20 nt, synthetic construct
  source 1..20: mol_type = other RNA
acaggagagtgcagggccag

SEQ ID NO: 27 - RNA, 20 nt, synthetic construct
  source 1..20: mol_type = other RNA
acagggatgaagagaagaaa

SEQ ID NO: 28 - RNA, 20 nt, synthetic construct
  source 1..20: mol_type = other RNA
accaggacctggccctgcac

SEQ ID NO: 29 - RNA, 20 nt, synthetic construct
  source 1..20: mol_type = other RNA
accgctcccataaagccatg

SEQ ID NO: 30 - RNA, 20 nt, synthetic construct
  source 1..20: mol_type = other RNA
acctcctccatcttcatgct

SEQ ID NO: 31 - RNA, 20 nt, synthetic construct
  source 1..20: mol_type = other RNA
acctgaacaccgctcccata

SEQ ID NO: 32 - RNA, 20 nt, synthetic construct
  source 1..20: mol_type = other RNA
acctggccctgcactctcct

SEQ ID NO: 33 - RNA, 20 nt, synthetic construct
  source 1..20: mol_type = other RNA
acctggctaccaggacctgg

SEQ ID NO: 34 - RNA, 20 nt, synthetic construct
  source 1..20: mol_type = other RNA
acctttgcagaagacaggga

SEQ ID NO: 35 - RNA, 20 nt, synthetic construct
  source 1..20: mol_type = other RNA
actcacctttgcagaagaca

SEQ ID NO: 36 - RNA, 20 nt, synthetic construct
  source 1..20: mol_type = other RNA
actctcctgttttttcttct

SEQ ID NO: 37 - RNA, 20 nt, synthetic construct
  source 1..20: mol_type = other RNA
acttcctgaagacctgaaca

SEQ ID NO: 38 - RNA, 20 nt, synthetic construct
  source 1..20: mol_type = other RNA
acttttggagcatgaagatg

SEQ ID NO: 39 - RNA, 20 nt, synthetic construct
  source 1..20: mol_type = other RNA
agaaaaaacaggagagtgca

SEQ ID NO: 40 - RNA, 20 nt, synthetic construct
  source 1..20: mol_type = other RNA
agaagaaaaaacaggagagt

SEQ ID NO: 41 - RNA, 20 nt, synthetic construct
  source 1..20: mol_type = other RNA
agaagacagggatgaagaga

SEQ ID NO: 42 - RNA, 20 nt, synthetic construct
  source 1..20: mol_type = other RNA
agacagggatgaagagaaga

SEQ ID NO: 43 - RNA, 20 nt, synthetic construct
  source 1..20: mol_type = other RNA
agacctgaacaccgctccca

SEQ ID NO: 44 - RNA, 20 nt, synthetic construct
  source 1..20: mol_type = other RNA
agacttttggagcatgaaga

SEQ ID NO: 45 - RNA, 20 nt, synthetic construct
  source 1..20: mol_type = other RNA
agagaagaaaaaacaggaga

SEQ ID NO: 46 - RNA, 20 nt, synthetic construct
  source 1..20: mol_type = other RNA
agagtgcagggccaggtcct

SEQ ID NO: 47 - RNA, 20 nt, synthetic construct
  source 1..20: mol_type = other RNA
agccaggttcagctgagcct

SEQ ID NO: 48 - RNA, 20 nt, synthetic construct
  source 1..20: mol_type = other RNA
agccatggcttgccttggat

SEQ ID NO: 49 - RNA, 20 nt, synthetic construct
  source 1..20: mol_type = other RNA
agccatggctttatgggagc

SEQ ID NO: 50 - RNA, 20 nt, synthetic construct
  source 1..20: mol_type = other RNA
agccttgtgccgctgaaatc

SEQ ID NO: 51 - RNA, 20 nt, synthetic construct
  source 1..20: mol_type = other RNA
agcggcacaaggctcagctg

SEQ ID NO: 52 - RNA, 20 nt, synthetic construct
  source 1..20: mol_type = other RNA
agcggtgttcaggtcttcag

SEQ ID NO: 53 - RNA, 20 nt, synthetic construct
  source 1..20: mol_type = other RNA
agctgaacctggctaccagg

SEQ ID NO: 54 - RNA, 20 nt, synthetic construct
  source 1..20: mol_type = other RNA
agctgagccttgtgccgctg

SEQ ID NO: 55 - RNA, 20 nt, synthetic construct
  source 1..20: mol_type = other RNA
aggacctggccctgcactct

SEQ ID NO: 56 - RNA, 20 nt, synthetic construct
  source 1..20: mol_type = other RNA
aggagagtgcagggccaggt

SEQ ID NO: 57 - RNA, 20 nt, synthetic construct
  source 1..20: mol_type = other RNA
aggcaagccatggctttatg

SEQ ID NO: 58 - RNA, 20 nt, synthetic construct
  source 1..20: mol_type = other RNA
aggctcagctgaacctggct

SEQ ID NO: 59 - RNA, 20 nt, synthetic construct
  source 1..20: mol_type = other RNA
agggatgaagagaagaaaaa

SEQ ID NO: 60 - RNA, 20 nt, synthetic construct
  source 1..20: mol_type = other RNA
agggccaggtcctggtagcc

SEQ ID NO: 61 - RNA, 20 nt, synthetic construct
  source 1..20: mol_type = other RNA
aggtcctggtagccaggttc

SEQ ID NO: 62 - RNA, 20 nt, synthetic construct
  source 1..20: mol_type = other RNA
aggtgagtgagacttttgga

SEQ ID NO: 63 - RNA, 20 nt, synthetic construct
  source 1..20: mol_type = other RNA
aggttcagctgagccttgtg

SEQ ID NO: 64 - RNA, 20 nt, synthetic construct
  source 1..20: mol_type = other RNA
agtctcactcacctttgcag

SEQ ID NO: 65 - RNA, 20 nt, synthetic construct
  source 1..20: mol_type = other RNA
agtgagacttttggagcatg

SEQ ID NO: 66 - RNA, 20 nt, synthetic construct
  source 1..20: mol_type = other RNA
agtgcagggccaggtcctgg

SEQ ID NO: 67 - RNA, 20 nt, synthetic construct
  source 1..20: mol_type = other RNA
ataaagccatggcttgcctt

SEQ ID NO: 68 - RNA, 20 nt, synthetic construct
  source 1..20: mol_type = other RNA
atccaaggcaagccatggct

SEQ ID NO: 69 - RNA, 20 nt, synthetic construct
  source 1..20: mol_type = other RNA
atccctgtcttctgcaaagg

SEQ ID NO: 70 - RNA, 20 nt, synthetic construct
  source 1..20: mol_type = other RNA
atcttcatgctccaaaagtc

SEQ ID NO: 71 - RNA, 20 nt, synthetic construct
  source 1..20: mol_type = other RNA
atgaagagaagaaaaaacag

SEQ ID NO: 72 - RNA, 20 nt, synthetic construct
  source 1..20: mol_type = other RNA
atgctccaaaagtctcactc

SEQ ID NO: 73 - RNA, 20 nt, synthetic construct
  source 1..20: mol_type = other RNA
atggcttgccttggatttca

SEQ ID NO: 74 - RNA, 20 nt, synthetic construct
  source 1..20: mol_type = other RNA
atggctttatgggagcggtg

SEQ ID NO: 75 - RNA, 20 nt, synthetic construct
  source 1..20: mol_type = other RNA
atgggagcggtgttcaggtc

SEQ ID NO: 76 - RNA, 20 nt, synthetic construct
  source 1..20: mol_type = other RNA
atttcagcggcacaaggctc

SEQ ID NO: 77 - RNA, 20 nt, synthetic construct
  source 1..20: mol_type = other RNA
caaaagtctcactcaccttt

SEQ ID NO: 78 - RNA, 20 nt, synthetic construct
  source 1..20: mol_type = other RNA
caaaggtgagtgagactttt

SEQ ID NO: 79 - RNA, 20 nt, synthetic construct
  source 1..20: mol_type = other RNA
caagccatggctttatggga

SEQ ID NO: 80 - RNA, 20 nt, synthetic construct
  source 1..20: mol_type = other RNA
caaggcaagccatggcttta

SEQ ID NO: 81 - RNA, 20 nt, synthetic construct
  source 1..20: mol_type = other RNA
caaggctcagctgaacctgg

SEQ ID NO: 82 - RNA, 20 nt, synthetic construct
  source 1..20: mol_type = other RNA
cacaaggctcagctgaacct

SEQ ID NO: 83 - RNA, 20 nt, synthetic construct
  source 1..20: mol_type = other RNA
caccgctcccataaagccat

SEQ ID NO: 84 - RNA, 20 nt, synthetic construct
  source 1..20: mol_type = other RNA
cacctcctccatcttcatgc

SEQ ID NO: 85 - RNA, 20 nt, synthetic construct
  source 1..20: mol_type = other RNA
cacctttgcagaagacaggg

SEQ ID NO: 86 - RNA, 20 nt, synthetic construct
  source 1..20: mol_type = other RNA
cactcacctttgcagaagac

SEQ ID NO: 87 - RNA, 20 nt, synthetic construct
  source 1..20: mol_type = other RNA
cactctcctgttttttcttc

SEQ ID NO: 88 - RNA, 20 nt, synthetic construct
  source 1..20: mol_type = other RNA
cagaagacagggatgaagag

SEQ ID NO: 89 - RNA, 20 nt, synthetic construct
  source 1..20: mol_type = other RNA
cagcggcacaaggctcagct

SEQ ID NO: 90 - RNA, 20 nt, synthetic construct
  source 1..20: mol_type = other RNA
cagctgaacctggctaccag

SEQ ID NO: 91 - RNA, 20 nt, synthetic construct
  source 1..20: mol_type = other RNA
cagctgagccttgtgccgct

SEQ ID NO: 92 - RNA, 20 nt, synthetic construct
  source 1..20: mol_type = other RNA
caggacctggccctgcactc

SEQ ID NO: 93 - RNA, 20 nt, synthetic construct
  source 1..20: mol_type = other RNA
caggagagtgcagggccagg

SEQ ID NO: 94 - RNA, 20 nt, synthetic construct
  source 1..20: mol_type = other RNA
cagggatgaagagaagaaaa

SEQ ID NO: 95 - RNA, 20 nt, synthetic construct
  source 1..20: mol_type = other RNA
cagggccaggtcctggtagc

SEQ ID NO: 96 - RNA, 20 nt, synthetic construct
  source 1..20: mol_type = other RNA
caggtcctggtagccaggtt

SEQ ID NO: 97 - RNA, 20 nt, synthetic construct
  source 1..20: mol_type = other RNA
caggttcagctgagccttgt

SEQ ID NO: 98 - RNA, 20 nt, synthetic construct
  source 1..20: mol_type = other RNA
cataaagccatggcttgcct

SEQ ID NO: 99 - RNA, 20 nt, synthetic construct
  source 1..20: mol_type = other RNA
catccctgtcttctgcaaag

SEQ ID NO: 100 - RNA, 20 nt, synthetic construct
  source 1..20: mol_type = other RNA
catcttcatgctccaaaagt

SEQ ID NO: 101 - RNA, 20 nt, synthetic construct
  source 1..20: mol_type = other RNA
catgctccaaaagtctcact

SEQ ID NO: 102 - RNA, 20 nt, synthetic construct
  source 1..20: mol_type = other RNA
catggcttgccttggatttc

SEQ ID NO: 103 - RNA, 20 nt, synthetic construct
  source 1..20: mol_type = other RNA
catggctttatgggagcggt

SEQ ID NO: 104 - RNA, 20 nt, synthetic construct
  source 1..20: mol_type = other RNA
ccaaaagtctcactcacctt

SEQ ID NO: 105 - RNA, 20 nt, synthetic construct
  source 1..20: mol_type = other RNA
ccaaggcaagccatggcttt

SEQ ID NO: 106 - RNA, 20 nt, synthetic construct
  source 1..20: mol_type = other RNA
ccaggacctggccctgcact

SEQ ID NO: 107 - RNA, 20 nt, synthetic construct
  source 1..20: mol_type = other RNA
ccaggtcctggtagccaggt

SEQ ID NO: 108 - RNA, 20 nt, synthetic construct
  source 1..20: mol_type = other RNA
ccaggttcagctgagccttg

SEQ ID NO: 109 - RNA, 20 nt, synthetic construct
  source 1..20: mol_type = other RNA
ccataaagccatggcttgcc

SEQ ID NO: 110 - RNA, 20 nt, synthetic construct
  source 1..20: mol_type = other RNA
ccatcttcatgctccaaaag

SEQ ID NO: 111 - RNA, 20 nt, synthetic construct
  source 1..20: mol_type = other RNA
ccatggcttgccttggattt

SEQ ID NO: 112 - RNA, 20 nt, synthetic construct
  source 1..20: mol_type = other RNA
ccatggctttatgggagcgg

SEQ ID NO: 113 - RNA, 20 nt, synthetic construct
  source 1..20: mol_type = other RNA
cccataaagccatggcttgc

SEQ ID NO: 114 - RNA, 20 nt, synthetic construct
  source 1..20: mol_type = other RNA
ccctgcactctcctgttttt

SEQ ID NO: 115 - RNA, 20 nt, synthetic construct
  source 1..20: mol_type = other RNA
ccctgtcttctgcaaaggtg

SEQ ID NO: 116 - RNA, 20 nt, synthetic construct
  source 1..20: mol_type = other RNA
ccgctcccataaagccatgg

SEQ ID NO: 117 - RNA, 20 nt, synthetic construct
  source 1..20: mol_type = other RNA
ccgctgaaatccaaggcaag

SEQ ID NO: 118 - RNA, 20 nt, synthetic construct
  source 1..20: mol_type = other RNA
cctccatcttcatgctccaa

SEQ ID NO: 119 - RNA, 20 nt, synthetic construct
  source 1..20: mol_type = other RNA
cctcctccatcttcatgctc

SEQ ID NO: 120 - RNA, 20 nt, synthetic construct
  source 1..20: mol_type = other RNA
cctgaacaccgctcccataa

SEQ ID NO: 121 - RNA, 20 nt, synthetic construct
  source 1..20: mol_type = other RNA
cctgaagacctgaacaccgc

SEQ ID NO: 122 - RNA, 20 nt, synthetic construct
  source 1..20: mol_type = other RNA
cctgcactctcctgtttttt

SEQ ID NO: 123 - RNA, 20 nt, synthetic construct
  source 1..20: mol_type = other RNA
cctggccctgcactctcctg

SEQ ID NO: 124 - RNA, 20 nt, synthetic construct
  source 1..20: mol_type = other RNA
cctggctaccaggacctggc

SEQ ID NO: 125 - RNA, 20 nt, synthetic construct
  source 1..20: mol_type = other RNA
cctggtagccaggttcagct

SEQ ID NO: 126 - RNA, 20 nt, synthetic construct
  source 1..20: mol_type = other RNA
cctgtcttctgcaaaggtga

SEQ ID NO: 127 - RNA, 20 nt, synthetic construct
  source 1..20: mol_type = other RNA
cctgttttttcttctcttca

SEQ ID NO: 128 - RNA, 20 nt, synthetic construct
  source 1..20: mol_type = other RNA
ccttggatttcagcggcaca

SEQ ID NO: 129 - RNA, 20 nt, synthetic construct
  source 1..20: mol_type = other RNA
ccttgtgccgctgaaatcca

SEQ ID NO: 130 - RNA, 20 nt, synthetic construct
  source 1..20: mol_type = other RNA
cctttgcagaagacagggat

SEQ ID NO: 131 - RNA, 20 nt, synthetic construct
  source 1..20: mol_type = other RNA
cgctcccataaagccatggc

SEQ ID NO: 132 - RNA, 20 nt, synthetic construct
  source 1..20: mol_type = other RNA
cgctgaaatccaaggcaagc

SEQ ID NO: 133 - RNA, 20 nt, synthetic construct
  source 1..20: mol_type = other RNA
cggcacaaggctcagctgaa

SEQ ID NO: 134 - RNA, 20 nt, synthetic construct
  source 1..20: mol_type = other RNA
ctaccaggacctggccctgc

SEQ ID NO: 135 - RNA, 20 nt, synthetic construct
  source 1..20: mol_type = other RNA
ctacttcctgaagacctgaa

SEQ ID NO: 136 - RNA, 20 nt, synthetic construct
  source 1..20: mol_type = other RNA
ctcacctttgcagaagacag

SEQ ID NO: 137 - RNA, 20 nt, synthetic construct
  source 1..20: mol_type = other RNA
ctcactcacctttgcagaag

SEQ ID NO: 138 - RNA, 20 nt, synthetic construct
  source 1..20: mol_type = other RNA
ctcagctgaacctggctacc

SEQ ID NO: 139 - RNA, 20 nt, synthetic construct
  source 1..20: mol_type = other RNA
ctccaaaagtctcactcacc

SEQ ID NO: 140 - RNA, 20 nt, synthetic construct
  source 1..20: mol_type = other RNA
ctccatcttcatgctccaaa

SEQ ID NO: 141 - RNA, 20 nt, synthetic construct
  source 1..20: mol_type = other RNA
ctcccataaagccatggctt

SEQ ID NO: 142 - RNA, 20 nt, synthetic construct
  source 1..20: mol_type = other RNA
ctcctccatcttcatgctcc

SEQ ID NO: 143 - RNA, 20 nt, synthetic construct
  source 1..20: mol_type = other RNA
ctcctgttttttcttctctt

SEQ ID NO: 144 - RNA, 20 nt, synthetic construct
  source 1..20: mol_type = other RNA
ctctcctgttttttcttctc

SEQ ID NO: 145 - RNA, 20 nt, synthetic construct
  source 1..20: mol_type = other RNA
ctcttcatccctgtcttctg

SEQ ID NO: 146 - RNA, 20 nt, synthetic construct
  source 1..20: mol_type = other RNA
ctgaaatccaaggcaagcca

SEQ ID NO: 147 - RNA, 20 nt, synthetic construct
  source 1..20: mol_type = other RNA
ctgaacaccgctcccataaa

SEQ ID NO: 148 - RNA, 20 nt, synthetic construct
  source 1..20: mol_type = other RNA
ctgaacctggctaccaggac

SEQ ID NO: 149 - RNA, 20 nt, synthetic construct
  source 1..20: mol_type = other RNA
ctgaagacctgaacaccgct

SEQ ID NO: 150 - RNA, 20 nt, synthetic construct
  source 1..20: mol_type = other RNA
ctgagccttgtgccgctgaa

SEQ ID NO: 151 - RNA, 20 nt, synthetic construct
  source 1..20: mol_type = other RNA
ctgcaaaggtgagtgagact

SEQ ID NO: 152 - RNA, 20 nt, synthetic construct
  source 1..20: mol_type = other RNA
ctgcactctcctgttttttc

SEQ ID NO: 153 - RNA, 20 nt, synthetic construct
  source 1..20: mol_type = other RNA
ctggccctgcactctcctgt

SEQ ID NO: 154 - RNA, 20 nt, synthetic construct
  source 1..20: mol_type = other RNA
ctggctaccaggacctggcc

SEQ ID NO: 155 - RNA, 20 nt, synthetic construct
  source 1..20: mol_type = other RNA
ctggtagccaggttcagctg

SEQ ID NO: 156 - RNA, 20 nt, synthetic construct
  source 1..20: mol_type = other RNA
ctgtcttctgcaaaggtgag

SEQ ID NO: 157 - RNA, 20 nt, synthetic construct
  source 1..20: mol_type = other RNA
ctgttttttcttctcttcat

SEQ ID NO: 158 - RNA, 20 nt, synthetic construct
  source 1..20: mol_type = other RNA
cttcatccctgtcttctgca

SEQ ID NO: 159 - RNA, 20 nt, synthetic construct
  source 1..20: mol_type = other RNA
cttcatgctccaaaagtctc

SEQ ID NO: 160 - RNA, 20 nt, synthetic construct
  source 1..20: mol_type = other RNA
cttcctgaagacctgaacac

SEQ ID NO: 161 - RNA, 20 nt, synthetic construct
  source 1..20: mol_type = other RNA
cttctcttcatccctgtctt

SEQ ID NO: 162 - RNA, 20 nt, synthetic construct
  source 1..20: mol_type = other RNA
cttctgcaaaggtgagtgag

SEQ ID NO: 163 - RNA, 20 nt, synthetic construct
  source 1..20: mol_type = other RNA
cttgccttggatttcagcgg

SEQ ID NO: 164 - RNA, 20 nt, synthetic construct
  source 1..20: mol_type = other RNA
cttggatttcagcggcacaa

SEQ ID NO: 165 - RNA, 20 nt, synthetic construct
  source 1..20: mol_type = other RNA
cttgtgccgctgaaatccaa

SEQ ID NO: 166 - RNA, 20 nt, synthetic construct
  source 1..20: mol_type = other RNA
ctttatgggagcggtgttca

SEQ ID NO: 167 - RNA, 20 nt, synthetic construct
  source 1..20: mol_type = other RNA
ctttgcagaagacagggatg

SEQ ID NO: 168 - RNA, 20 nt, synthetic construct
  source 1..20: mol_type = other RNA
cttttggagcatgaagatgg

SEQ ID NO: 169 - RNA, 20 nt, synthetic construct
  source 1..20: mol_type = other RNA
gaaaaaacaggagagtgcag

SEQ ID NO: 170 - RNA, 20 nt, synthetic construct
  source 1..20: mol_type = other RNA
gaaatccaaggcaagccatg

SEQ ID NO: 171 - RNA, 20 nt, synthetic construct
  source 1..20: mol_type = other RNA
gaacaccgctcccataaagc

SEQ ID NO: 172 - RNA, 20 nt, synthetic construct
  source 1..20: mol_type = other RNA
gaacctggctaccaggacct

SEQ ID NO: 173 - RNA, 20 nt, synthetic construct
  source 1..20: mol_type = other RNA
gaagaaaaaacaggagagtg

SEQ ID NO: 174 - RNA, 20 nt, synthetic construct
  source 1..20: mol_type = other RNA
gaagacagggatgaagagaa

SEQ ID NO: 175 - RNA, 20 nt, synthetic construct
  source 1..20: mol_type = other RNA
gaagacctgaacaccgctcc

SEQ ID NO: 176 - RNA, 20 nt, synthetic construct
  source 1..20: mol_type = other RNA
gaagagaagaaaaaacagga

SEQ ID NO: 177 - RNA, 20 nt, synthetic construct
  source 1..20: mol_type = other RNA
gacagggatgaagagaagaa

SEQ ID NO: 178 - RNA, 20 nt, synthetic construct
  source 1..20: mol_type = other RNA
gacctgaacaccgctcccat

SEQ ID NO: 179 - RNA, 20 nt, synthetic construct
  source 1..20: mol_type = other RNA
gacctggccctgcactctcc

SEQ ID NO: 180 - RNA, 20 nt, synthetic construct
  source 1..20: mol_type = other RNA
gacttttggagcatgaagat

SEQ ID NO: 181 - RNA, 20 nt, synthetic construct
  source 1..20: mol_type = other RNA
gagaagaaaaaacaggagag

SEQ ID NO: 182 - RNA, 20 nt, synthetic construct
  source 1..20: mol_type = other RNA
gagacttttggagcatgaag

SEQ ID NO: 183 - RNA, 20 nt, synthetic construct
  source 1..20: mol_type = other RNA
gagagtgcagggccaggtcc

SEQ ID NO: 184 - RNA, 20 nt, synthetic construct
  source 1..20: mol_type = other RNA
gagccttgtgccgctgaaat

SEQ ID NO: 185 - RNA, 20 nt, synthetic construct
  source 1..20: mol_type = other RNA
gagcggtgttcaggtcttca

SEQ ID NO: 186 - RNA, 20 nt, synthetic construct
  source 1..20: mol_type = other RNA
gagtgagacttttggagcat

SEQ ID NO: 187 - RNA, 20 nt, synthetic construct
  source 1..20: mol_type = other RNA
gagtgcagggccaggtcctg

SEQ ID NO: 188 - RNA, 20 nt, synthetic construct
  source 1..20: mol_type = other RNA
gatgaagagaagaaaaaaca

SEQ ID NO: 189 - RNA, 20 nt, synthetic construct
  source 1..20: mol_type = other RNA
gatttcagcggcacaaggct

SEQ ID NO: 190 - RNA, 20 nt, synthetic construct
  source 1..20: mol_type = other RNA
gcaaaggtgagtgagacttt

SEQ ID NO: 191 - RNA, 20 nt, synthetic construct
  source 1..20: mol_type = other RNA
gcaagccatggctttatggg

SEQ ID NO: 192 - RNA, 20 nt, synthetic construct
  source 1..20: mol_type = other RNA
gcacaaggctcagctgaacc

SEQ ID NO: 193 - RNA, 20 nt, synthetic construct
  source 1..20: mol_type = other RNA
gcactctcctgttttttctt

SEQ ID NO: 194 - RNA, 20 nt, synthetic construct
  source 1..20: mol_type = other RNA
gcagaagacagggatgaaga

SEQ ID NO: 195 - RNA, 20 nt, synthetic construct
  source 1..20: mol_type = other RNA
gcagggccaggtcctggtag

SEQ ID NO: 196 - RNA, 20 nt, synthetic construct
  source 1..20: mol_type = other RNA
gccaggtcctggtagccagg

SEQ ID NO: 197 - RNA, 20 nt, synthetic construct
  source 1..20: mol_type = other RNA
gccaggttcagctgagcctt

SEQ ID NO: 198 - RNA, 20 nt, synthetic construct
  source 1..20: mol_type = other RNA
gccatggcttgccttggatt

SEQ ID NO: 199 - RNA, 20 nt, synthetic construct
  source 1..20: mol_type = other RNA
gccatggctttatgggagcg

SEQ ID NO: 200 - RNA, 20 nt, synthetic construct
  source 1..20: mol_type = other RNA
gccctgcactctcctgtttt

SEQ ID NO: 201 - RNA, 20 nt, synthetic construct
  source 1..20: mol_type = other RNA
gccgctgaaatccaaggcaa

SEQ ID NO: 202 - RNA, 20 nt, synthetic construct
  source 1..20: mol_type = other RNA
gccttggatttcagcggcac

SEQ ID NO: 203 - RNA, 20 nt, synthetic construct
  source 1..20: mol_type = other RNA
gccttgtgccgctgaaatcc

SEQ ID NO: 204 - RNA, 20 nt, synthetic construct
  source 1..20: mol_type = other RNA
gcggcacaaggctcagctga

SEQ ID NO: 205 - RNA, 20 nt, synthetic construct
  source 1..20: mol_type = other RNA
gctaccaggacctggccctg

SEQ ID NO: 206 - RNA, 20 nt, synthetic construct
  source 1..20: mol_type = other RNA
gctcagctgaacctggctac

SEQ ID NO: 207 - RNA, 20 nt, synthetic construct
  source 1..20: mol_type = other RNA
gctccaaaagtctcactcac

SEQ ID NO: 208 - RNA, 20 nt, synthetic construct
  source 1..20: mol_type = other RNA
gctcccataaagccatggct

SEQ ID NO: 209 - RNA, 20 nt, synthetic construct
  source 1..20: mol_type = other RNA
gctgaaatccaaggcaagcc

SEQ ID NO: 210 - RNA, 20 nt, synthetic construct
  source 1..20: mol_type = other RNA
gctgaacctggctaccagga

SEQ ID NO: 211 - RNA, 20 nt, synthetic construct
  source 1..20: mol_type = other RNA
gctgagccttgtgccgctga

SEQ ID NO: 212 - RNA, 20 nt, synthetic construct
  source 1..20: mol_type = other RNA
gcttgccttggatttcagcg

SEQ ID NO: 213 - RNA, 20 nt, synthetic construct
  source 1..20: mol_type = other RNA
gctttatgggagcggtgttc

SEQ ID NO: 214 - RNA, 20 nt, synthetic construct
  source 1..20: mol_type = other RNA
ggacctggccctgcactctc

SEQ ID NO: 215 - RNA, 20 nt, synthetic construct
  source 1..20: mol_type = other RNA
ggagagtgcagggccaggtc

SEQ ID NO: 216 - RNA, 20 nt, synthetic construct
  source 1..20: mol_type = other RNA
ggagcggtgttcaggtcttc

SEQ ID NO: 217 - RNA, 20 nt, synthetic construct
  source 1..20: mol_type = other RNA
ggatgaagagaagaaaaaac

SEQ ID NO: 218 - RNA, 20 nt, synthetic construct
  source 1..20: mol_type = other RNA
ggatttcagcggcacaaggc

SEQ ID NO: 219 - RNA, 20 nt, synthetic construct
  source 1..20: mol_type = other RNA
ggcaagccatggctttatgg

SEQ ID NO: 220 - RNA, 20 nt, synthetic construct
  source 1..20: mol_type = other RNA
ggcacaaggctcagctgaac

SEQ ID NO: 221 - RNA, 20 nt, synthetic construct
  source 1..20: mol_type = other RNA
ggccaggtcctggtagccag

SEQ ID NO: 222 - RNA, 20 nt, synthetic construct
  source 1..20: mol_type = other RNA
ggccctgcactctcctgttt

SEQ ID NO: 223 - RNA, 20 nt, synthetic construct
  source 1..20: mol_type = other RNA
ggctaccaggacctggccct

SEQ ID NO: 224 - RNA, 20 nt, synthetic construct
  source 1..20: mol_type = other RNA
ggctcagctgaacctggcta

SEQ ID NO: 225 - RNA, 20 nt, synthetic construct
  source 1..20: mol_type = other RNA
ggcttgccttggatttcagc

SEQ ID NO: 226 - RNA, 20 nt, synthetic construct
  source 1..20: mol_type = other RNA
ggctttatgggagcggtgtt

SEQ ID NO: 227 - RNA, 20 nt, synthetic construct
  source 1..20: mol_type = other RNA
gggagcggtgttcaggtctt

SEQ ID NO: 228 - RNA, 20 nt, synthetic construct
  source 1..20: mol_type = other RNA
gggatgaagagaagaaaaaa

SEQ ID NO: 229 - RNA, 20 nt, synthetic construct
  source 1..20: mol_type = other RNA
gggccaggtcctggtagcca

SEQ ID NO: 230 - RNA, 20 nt, synthetic construct
  source 1..20: mol_type = other RNA
ggtagccaggttcagctgag

SEQ ID NO: 231 - RNA, 20 nt, synthetic construct
  source 1..20: mol_type = other RNA
ggtcctggtagccaggttca

SEQ ID NO: 232 - RNA, 20 nt, synthetic construct
  source 1..20: mol_type = other RNA
ggtgagtgagacttttggag

SEQ ID NO: 233 - RNA, 20 nt, synthetic construct
  source 1..20: mol_type = other RNA
ggttcagctgagccttgtgc

SEQ ID NO: 234 - RNA, 20 nt, synthetic construct
  source 1..20: mol_type = other RNA
gtagccaggttcagctgagc

SEQ ID NO: 235 - RNA, 20 nt, synthetic construct
  source 1..20: mol_type = other RNA
gtcctggtagccaggttcag

SEQ ID NO: 236 - RNA, 20 nt, synthetic construct
  source 1..20: mol_type = other RNA
gtctcactcacctttgcaga

SEQ ID NO: 237 - RNA, 20 nt, synthetic construct
  source 1..20: mol_type = other RNA
gtcttctgcaaaggtgagtg

SEQ ID NO: 238 - RNA, 20 nt, synthetic construct
  source 1..20: mol_type = other RNA
gtgagacttttggagcatga

SEQ ID NO: 239 - RNA, 20 nt, synthetic construct
  source 1..20: mol_type = other RNA
gtgagtgagacttttggagc

SEQ ID NO: 240 - RNA, 20 nt, synthetic construct
  source 1..20: mol_type = other RNA
gtgcagggccaggtcctggt

SEQ ID NO: 241 - RNA, 20 nt, synthetic construct
  source 1..20: mol_type = other RNA
gtgccgctgaaatccaaggc

SEQ ID NO: 242 - RNA, 20 nt, synthetic construct
  source 1..20: mol_type = other RNA
gttcagctgagccttgtgcc

SEQ ID NO: 243 - RNA, 20 nt, synthetic construct
  source 1..20: mol_type = other RNA
gttttttcttctcttcatcc

SEQ ID NO: 244 - RNA, 20 nt, synthetic construct
  source 1..20: mol_type = other RNA
taaagccatggcttgccttg

SEQ ID NO: 245 - RNA, 20 nt, synthetic construct
  source 1..20: mol_type = other RNA
taccaggacctggccctgca

SEQ ID NO: 246 - RNA, 20 nt, synthetic construct
  source 1..20: mol_type = other RNA
tacttcctgaagacctgaac

SEQ ID NO: 247 - RNA, 20 nt, synthetic construct
  source 1..20: mol_type = other RNA
tagccaggttcagctgagcc

SEQ ID NO: 248 - RNA, 20 nt, synthetic construct
  source 1..20: mol_type = other RNA
tatgggagcggtgttcaggt

SEQ ID NO: 249 - RNA, 20 nt, synthetic construct
  source 1..20: mol_type = other RNA
tcacctttgcagaagacagg

SEQ ID NO: 250 - RNA, 20 nt, synthetic construct
  source 1..20: mol_type = other RNA
tcactcacctttgcagaaga

SEQ ID NO: 251 - RNA, 20 nt, synthetic construct
  source 1..20: mol_type = other RNA
tcagcggcacaaggctcagc

SEQ ID NO: 252 - RNA, 20 nt, synthetic construct
  source 1..20: mol_type = other RNA
tcagctgaacctggctacca

SEQ ID NO: 253 - RNA, 20 nt, synthetic construct
  source 1..20: mol_type = other RNA
tcagctgagccttgtgccgc

SEQ ID NO: 254 - RNA, 20 nt, synthetic construct
  source 1..20: mol_type = other RNA
tcatccctgtcttctgcaaa

SEQ ID NO: 255 - RNA, 20 nt, synthetic construct
  source 1..20: mol_type = other RNA
tcatgctccaaaagtctcac

SEQ ID NO: 256 - RNA, 20 nt, synthetic construct
  source 1..20: mol_type = other RNA
tccaaaagtctcactcacct

SEQ ID NO: 257 - RNA, 20 nt, synthetic construct
  source 1..20: mol_type = other RNA
tccaaggcaagccatggctt

SEQ ID NO: 258 - RNA, 20 nt, synthetic construct
  source 1..20: mol_type = other RNA
tccatcttcatgctccaaaa

SEQ ID NO: 259 - RNA, 20 nt, synthetic construct
  source 1..20: mol_type = other RNA
tcccataaagccatggcttg

SEQ ID NO: 260 - RNA, 20 nt, synthetic construct
  source 1..20: mol_type = other RNA
tccctgtcttctgcaaaggt

SEQ ID NO: 261 - RNA, 20 nt, synthetic construct
  source 1..20: mol_type = other RNA
tcctccatcttcatgctcca

SEQ ID NO: 262 - RNA, 20 nt, synthetic construct
  source 1..20: mol_type = other RNA
tcctgaagacctgaacaccg

SEQ ID NO: 263 - RNA, 20 nt, synthetic construct
  source 1..20: mol_type = other RNA
tcctggtagccaggttcagc

SEQ ID NO: 264 - RNA, 20 nt, synthetic construct
  source 1..20: mol_type = other RNA
tcctgttttttcttctcttc

SEQ ID NO: 265 - RNA, 20 nt, synthetic construct
  source 1..20: mol_type = other RNA
tctacttcctgaagacctga

SEQ ID NO: 266 - RNA, 20 nt, synthetic construct
  source 1..20: mol_type = other RNA
tctcactcacctttgcagaa

SEQ ID NO: 267 - RNA, 20 nt, synthetic construct
  source 1..20: mol_type = other RNA
tctcctgttttttcttctct

SEQ ID NO: 268 - RNA, 20 nt, synthetic construct
  source 1..20: mol_type = other RNA
tctcttcatccctgtcttct

SEQ ID NO: 269 - RNA, 20 nt, synthetic construct
  source 1..20: mol_type = other RNA
tctgcaaaggtgagtgagac

SEQ ID NO: 270 - RNA, 20 nt, synthetic construct
  source 1..20: mol_type = other RNA
tcttcatccctgtcttctgc

SEQ ID NO: 271 - RNA, 20 nt, synthetic construct
  source 1..20: mol_type = other RNA
tcttcatgctccaaaagtct

SEQ ID NO: 272 - RNA, 20 nt, synthetic construct
  source 1..20: mol_type = other RNA
tcttctcttcatccctgtct

SEQ ID NO: 273 - RNA, 20 nt, synthetic construct
  source 1..20: mol_type = other RNA
tcttctgcaaaggtgagtga

SEQ ID NO: 274 - RNA, 20 nt, synthetic construct
  source 1..20: mol_type = other RNA
tgaaatccaaggcaagccat

SEQ ID NO: 275 - RNA, 20 nt, synthetic construct
  source 1..20: mol_type = other RNA
tgaacaccgctcccataaag

SEQ ID NO: 276 - RNA, 20 nt, synthetic construct
  source 1..20: mol_type = other RNA
tgaacctggctaccaggacc

SEQ ID NO: 277 - RNA, 20 nt, synthetic construct
  source 1..20: mol_type = other RNA
tgaagacctgaacaccgctc

SEQ ID NO: 278 - RNA, 20 nt, synthetic construct
  source 1..20: mol_type = other RNA
tgaagagaagaaaaaacagg

SEQ ID NO: 279 - RNA, 20 nt, synthetic construct
  source 1..20: mol_type = other RNA
tgagacttttggagcatgaa

SEQ ID NO: 280 - RNA, 20 nt, synthetic construct
  source 1..20: mol_type = other RNA
tgagccttgtgccgctgaaa

SEQ ID NO: 281 - RNA, 20 nt, synthetic construct
  source 1..20: mol_type = other RNA
tgagtgagacttttggagca

SEQ ID NO: 282 - RNA, 20 nt, synthetic construct
  source 1..20: mol_type = other RNA
tgcaaaggtgagtgagactt

SEQ ID NO: 283 - RNA, 20 nt, synthetic construct
  source 1..20: mol_type = other RNA
tgcactctcctgttttttct

SEQ ID NO: 284 - RNA, 20 nt, synthetic construct
  source 1..20: mol_type = other RNA
tgcagaagacagggatgaag

SEQ ID NO: 285 - RNA, 20 nt, synthetic construct
  source 1..20: mol_type = other RNA
tgcagggccaggtcctggta

SEQ ID NO: 286 - RNA, 20 nt, synthetic construct
  source 1..20: mol_type = other RNA
tgccgctgaaatccaaggca

SEQ ID NO: 287 - RNA, 20 nt, synthetic construct
  source 1..20: mol_type = other RNA
tgccttggatttcagcggca

SEQ ID NO: 288 - RNA, 20 nt, synthetic construct
  source 1..20: mol_type = other RNA
tgctccaaaagtctcactca

SEQ ID NO: 289 - RNA, 20 nt, synthetic construct
  source 1..20: mol_type = other RNA
tggatttcagcggcacaagg

SEQ ID NO: 290 - RNA, 20 nt, synthetic construct
  source 1..20: mol_type = other RNA
tggccctgcactctcctgtt

SEQ ID NO: 291 - RNA, 20 nt, synthetic construct
  source 1..20: mol_type = other RNA
tggctaccaggacctggccc

SEQ ID NO: 292 - RNA, 20 nt, synthetic construct
  source 1..20: mol_type = other RNA
tggcttgccttggatttcag

SEQ ID NO: 293 - RNA, 20 nt, synthetic construct
  source 1..20: mol_type = other RNA
tggctttatgggagcggtgt

SEQ ID NO: 294 - RNA, 20 nt, synthetic construct
  source 1..20: mol_type = other RNA
tgggagcggtgttcaggtct

SEQ ID NO: 295 - RNA, 20 nt, synthetic construct
  source 1..20: mol_type = other RNA
tggtagccaggttcagctga

SEQ ID NO: 296 - RNA, 20 nt, synthetic construct
  source 1..20: mol_type = other RNA
tgtcttctgcaaaggtgagt

SEQ ID NO: 297 - RNA, 20 nt, synthetic construct
  source 1..20: mol_type = other RNA
tgtgccgctgaaatccaagg

SEQ ID NO: 298 - RNA, 20 nt, synthetic construct
  source 1..20: mol_type = other RNA
tgttttttcttctcttcatc

SEQ ID NO: 299 - RNA, 20 nt, synthetic construct
  source 1..20: mol_type = other RNA
ttatgggagcggtgttcagg

SEQ ID NO: 300 - RNA, 20 nt, synthetic construct
  source 1..20: mol_type = other RNA
ttcagcggcacaaggctcag

SEQ ID NO: 301 - RNA, 20 nt, synthetic construct
  source 1..20: mol_type = other RNA
ttcagctgagccttgtgccg

SEQ ID NO: 302 - RNA, 20 nt, synthetic construct
  source 1..20: mol_type = other RNA
ttcatccctgtcttctgcaa

SEQ ID NO: 303 - RNA, 20 nt, synthetic construct
  source 1..20: mol_type = other RNA
ttcatgctccaaaagtctca

SEQ ID NO: 304 - RNA, 20 nt, synthetic construct
  source 1..20: mol_type = other RNA
ttcctgaagacctgaacacc

SEQ ID NO: 305 - RNA, 20 nt, synthetic construct
  source 1..20: mol_type = other RNA
ttctcttcatccctgtcttc

SEQ ID NO: 306 - RNA, 20 nt, synthetic construct
  source 1..20: mol_type = other RNA
ttctgcaaaggtgagtgaga

SEQ ID NO: 307 - RNA, 20 nt, synthetic construct
  source 1..20: mol_type = other RNA
ttcttctcttcatccctgtc

SEQ ID NO: 308 - RNA, 20 nt, synthetic construct
  source 1..20: mol_type = other RNA
ttgcagaagacagggatgaa

SEQ ID NO: 309 - RNA, 20 nt, synthetic construct
  source 1..20: mol_type = other RNA
ttgccttggatttcagcggc

SEQ ID NO: 310 - RNA, 20 nt, synthetic construct
  source 1..20: mol_type = other RNA
ttggatttcagcggcacaag

SEQ ID NO: 311 - RNA, 20 nt, synthetic construct
  source 1..20: mol_type = other RNA
ttgtgccgctgaaatccaag

SEQ ID NO: 312 - RNA, 20 nt, synthetic construct
  source 1..20: mol_type = other RNA
tttatgggagcggtgttcag

SEQ ID NO: 313 - RNA, 20 nt, synthetic construct
  source 1..20: mol_type = other RNA
tttcagcggcacaaggctca

SEQ ID NO: 314 - RNA, 20 nt, synthetic construct
  source 1..20: mol_type = other RNA
tttcttctcttcatccctgt

SEQ ID NO: 315 - RNA, 20 nt, synthetic construct
  source 1..20: mol_type = other RNA
tttgcagaagacagggatga

SEQ ID NO: 316 - RNA, 20 nt, synthetic construct
  source 1..20: mol_type = other RNA
ttttcttctcttcatccctg

SEQ ID NO: 317 - RNA, 20 nt, synthetic construct
  source 1..20: mol_type = other RNA
tttttcttctcttcatccct

SEQ ID NO: 318 - RNA, 20 nt, synthetic construct
  source 1..20: mol_type = other RNA
ttttttcttctcttcatccc

SEQ ID NO: 319 - RNA, 21 nt, synthetic construct
  source 1..21: mol_type = other RNA
aaaaaacaggagagtgcaggg

SEQ ID NO: 320 - RNA, 21 nt, synthetic construct
  source 1..21: mol_type = other RNA
aaaaacaggagagtgcagggc

SEQ ID NO: 321 - RNA, 21 nt, synthetic construct
  source 1..21: mol_type = other RNA
aaaacaggagagtgcagggcc

SEQ ID NO: 322 - RNA, 21 nt, synthetic construct
  source 1..21: mol_type = other RNA
aaaagtctcactcacctttgc

SEQ ID NO: 323 - RNA, 21 nt, synthetic construct
  source 1..21: mol_type = other RNA
aaacaggagagtgcagggcca

SEQ ID NO: 324 - RNA, 21 nt, synthetic construct
  source 1..21: mol_type = other RNA
aaagccatggcttgccttgga

SEQ ID NO: 325 - RNA, 21 nt, synthetic construct
  source 1..21: mol_type = other RNA
aaaggtgagtgagacttttgg

SEQ ID NO: 326 - RNA, 21 nt, synthetic construct
  source 1..21: mol_type = other RNA
aaagtctcactcacctttgca

SEQ ID NO: 327 - RNA, 21 nt, synthetic construct
  source 1..21: mol_type = other RNA
aaatccaaggcaagccatggc

SEQ ID NO: 328 - RNA, 21 nt, synthetic construct
  source 1..21: mol_type = other RNA
aacaccgctcccataaagcca

SEQ ID NO: 329 - RNA, 21 nt, synthetic construct
  source 1..21: mol_type = other RNA
aacaggagagtgcagggccag

SEQ ID NO: 330 - RNA, 21 nt, synthetic construct
  source 1..21: mol_type = other RNA
aacctggctaccaggacctgg

SEQ ID NO: 331 - RNA, 21 nt, synthetic construct
  source 1..21: mol_type = other RNA
aagaaaaaacaggagagtgca

SEQ ID NO: 332 - RNA, 21 nt, synthetic construct
  source 1..21: mol_type = other RNA
aagacagggatgaagagaaga

SEQ ID NO: 333 - RNA, 21 nt, synthetic construct
  source 1..21: mol_type = other RNA
aagacctgaacaccgctccca

SEQ ID NO: 334 - RNA, 21 nt, synthetic construct
  source 1..21: mol_type = other RNA
aagagaagaaaaaacaggaga

SEQ ID NO: 335 - RNA, 21 nt, synthetic construct
  source 1..21: mol_type = other RNA
aagccatggcttgccttggat

SEQ ID NO: 336 - RNA, 21 nt, synthetic construct
  source 1..21: mol_type = other RNA
aagccatggctttatgggagc

SEQ ID NO: 337 - RNA, 21 nt, synthetic construct
  source 1..21: mol_type = other RNA
aaggcaagccatggctttatg

SEQ ID NO: 338 - RNA, 21 nt, synthetic construct
  source 1..21: mol_type = other RNA
aaggctcagctgaacctggct

SEQ ID NO: 339 - RNA, 21 nt, synthetic construct
  source 1..21: mol_type = other RNA
aaggtgagtgagacttttgga

SEQ ID NO: 340 - RNA, 21 nt, synthetic construct
  source 1..21: mol_type = other RNA
aagtctcactcacctttgcag

SEQ ID NO: 341 - RNA, 21 nt, synthetic construct
  source 1..21: mol_type = other RNA
aatccaaggcaagccatggct

SEQ ID NO: 342 - RNA, 21 nt, synthetic construct
  source 1..21: mol_type = other RNA
acaaggctcagctgaacctgg

SEQ ID NO: 343 - RNA, 21 nt, synthetic construct
  source 1..21: mol_type = other RNA
acaccgctcccataaagccat

SEQ ID NO: 344 - RNA, 21 nt, synthetic construct
  source 1..21: mol_type = other RNA
acaggagagtgcagggccagg

SEQ ID NO: 345 - RNA, 21 nt, synthetic construct
  source 1..21: mol_type = other RNA
acagggatgaagagaagaaaa

SEQ ID NO: 346 - RNA, 21 nt, synthetic construct
  source 1..21: mol_type = other RNA
accaggacctggccctgcact

SEQ ID NO: 347 - RNA, 21 nt, synthetic construct
  source 1..21: mol_type = other RNA
accgctcccataaagccatgg

SEQ ID NO: 348 - RNA, 21 nt, synthetic construct
  source 1..21: mol_type = other RNA
acctcctccatcttcatgctc

SEQ ID NO: 349 - RNA, 21 nt, synthetic construct
  source 1..21: mol_type = other RNA
acctgaacaccgctcccataa

SEQ ID NO: 350 - RNA, 21 nt, synthetic construct
  source 1..21: mol_type = other RNA
acctggccctgcactctcctg

SEQ ID NO: 351 - RNA, 21 nt, synthetic construct
  source 1..21: mol_type = other RNA
acctggctaccaggacctggc

SEQ ID NO: 352 - RNA, 21 nt, synthetic construct
  source 1..21: mol_type = other RNA
acctttgcagaagacagggat

SEQ ID NO: 353 - RNA, 21 nt, synthetic construct
  source 1..21: mol_type = other RNA
actcacctttgcagaagacag

SEQ ID NO: 354 - RNA, 21 nt, synthetic construct
  source 1..21: mol_type = other RNA
actctcctgttttttcttctc

SEQ ID NO: 355 - RNA, 21 nt, synthetic construct
  source 1..21: mol_type = other RNA
acttcctgaagacctgaacac

SEQ ID NO: 356 - RNA, 21 nt, synthetic construct
  source 1..21: mol_type = other RNA
acttttggagcatgaagatgg

SEQ ID NO: 357 - RNA, 21 nt, synthetic construct
  source 1..21: mol_type = other RNA
agaaaaaacaggagagtgcag

SEQ ID NO: 358 - RNA, 21 nt, synthetic construct
  source 1..21: mol_type = other RNA
agaagaaaaaacaggagagtg

SEQ ID NO: 359 - RNA, 21 nt, synthetic construct
  source 1..21: mol_type = other RNA
agaagacagggatgaagagaa

SEQ ID NO: 360 - RNA, 21 nt, synthetic construct
  source 1..21: mol_type = other RNA
agacagggatgaagagaagaa

SEQ ID NO: 361 - RNA, 21 nt, synthetic construct
  source 1..21: mol_type = other RNA
agacctgaacaccgctcccat

SEQ ID NO: 362 - RNA, 21 nt, synthetic construct
  source 1..21: mol_type = other RNA
agacttttggagcatgaagat

SEQ ID NO: 363 - RNA, 21 nt, synthetic construct
  source 1..21: mol_type = other RNA
agagaagaaaaaacaggagag

SEQ ID NO: 364 - RNA, 21 nt, synthetic construct
  source 1..21: mol_type = other RNA
agagtgcagggccaggtcctg

SEQ ID NO: 365 - RNA, 21 nt, synthetic construct
  source 1..21: mol_type = other RNA
agccaggttcagctgagcctt

SEQ ID NO: 366 - RNA, 21 nt, synthetic construct
  source 1..21: mol_type = other RNA
agccatggcttgccttggatt

SEQ ID NO: 367 - RNA, 21 nt, synthetic construct
  source 1..21: mol_type = other RNA
agccatggctttatgggagcg

SEQ ID NO: 368 - RNA, 21 nt, synthetic construct
  source 1..21: mol_type = other RNA
agccttgtgccgctgaaatcc

SEQ ID NO: 369 - RNA, 21 nt, synthetic construct
  source 1..21: mol_type = other RNA
agcggcacaaggctcagctga

SEQ ID NO: 370 - RNA, 21 nt, synthetic construct
  source 1..21: mol_type = other RNA
agctgaacctggctaccagga

SEQ ID NO: 371 - RNA, 21 nt, synthetic construct
  source 1..21: mol_type = other RNA
agctgagccttgtgccgctga

SEQ ID NO: 372 - RNA, 21 nt, synthetic construct
  source 1..21: mol_type = other RNA
aggacctggccctgcactctc

SEQ ID NO: 373 - RNA, 21 nt, synthetic construct
  source 1..21: mol_type = other RNA
aggagagtgcagggccaggtc

SEQ ID NO: 374 - RNA, 21 nt, synthetic construct
  source 1..21: mol_type = other RNA
aggcaagccatggctttatgg

SEQ ID NO: 375 - RNA, 21 nt, synthetic construct
  source 1..21: mol_type = other RNA
aggctcagctgaacctggcta

SEQ ID NO: 376 - RNA, 21 nt, synthetic construct
  source 1..21: mol_type = other RNA
agggatgaagagaagaaaaaa

SEQ ID NO: 377 - RNA, 21 nt, synthetic construct
  source 1..21: mol_type = other RNA
agggccaggtcctggtagcca

SEQ ID NO: 378 - RNA, 21 nt, synthetic construct
  source 1..21: mol_type = other RNA
aggtcctggtagccaggttca

SEQ ID NO: 379 - RNA, 21 nt, synthetic construct
  source 1..21: mol_type = other RNA
aggtgagtgagacttttggag

SEQ ID NO: 380 - RNA, 21 nt, synthetic construct
  source 1..21: mol_type = other RNA
aggttcagctgagccttgtgc

SEQ ID NO: 381 - RNA, 21 nt, synthetic construct
  source 1..21: mol_type = other RNA
agtctcactcacctttgcaga

SEQ ID NO: 382 - RNA, 21 nt, synthetic construct
  source 1..21: mol_type = other RNA
agtgagacttttggagcatga

SEQ ID NO: 383 - RNA, 21 nt, synthetic construct
  source 1..21: mol_type = other RNA
agtgcagggccaggtcctggt

SEQ ID NO: 384 - RNA, 21 nt, synthetic construct
  source 1..21: mol_type = other RNA
ataaagccatggcttgccttg

SEQ ID NO: 385 - RNA, 21 nt, synthetic construct
  source 1..21: mol_type = other RNA
atccaaggcaagccatggctt

SEQ ID NO: 386 - RNA, 21 nt, synthetic construct
  source 1..21: mol_type = other RNA
atccctgtcttctgcaaaggt

SEQ ID NO: 387 - RNA, 21 nt, synthetic construct
  source 1..21: mol_type = other RNA
atcttcatgctccaaaagtct

SEQ ID NO: 388 - RNA, 21 nt, synthetic construct
  source 1..21: mol_type = other RNA
atgaagagaagaaaaaacagg

SEQ ID NO: 389 - RNA, 21 nt, synthetic construct
  source 1..21: mol_type = other RNA
atgctccaaaagtctcactca

SEQ ID NO: 390 - RNA, 21 nt, synthetic construct
  source 1..21: mol_type = other RNA
atggcttgccttggatttcag

SEQ ID NO: 391 - RNA, 21 nt, synthetic construct
  source 1..21: mol_type = other RNA
atggctttatgggagcggtgt

SEQ ID NO: 392 - RNA, 21 nt, synthetic construct
  source 1..21: mol_type = other RNA
atgggagcggtgttcaggtct

SEQ ID NO: 393 - RNA, 21 nt, synthetic construct
  source 1..21: mol_type = other RNA
atttcagcggcacaaggctca

SEQ ID NO: 394 - RNA, 21 nt, synthetic construct
  source 1..21: mol_type = other RNA
caaaagtctcactcacctttg

SEQ ID NO: 395 - RNA, 21 nt, synthetic construct
  source 1..21: mol_type = other RNA
caaaggtgagtgagacttttg

SEQ ID NO: 396 - RNA, 21 nt, synthetic construct
  source 1..21: mol_type = other RNA
caagccatggctttatgggag

SEQ ID NO: 397 - RNA, 21 nt, synthetic construct
  source 1..21: mol_type = other RNA
caaggcaagccatggctttat

SEQ ID NO: 398 - RNA, 21 nt, synthetic construct
  source 1..21: mol_type = other RNA
caaggctcagctgaacctggc

SEQ ID NO: 399 - RNA, 21 nt, synthetic construct
  source 1..21: mol_type = other RNA
cacaaggctcagctgaacctg

SEQ ID NO: 400 - RNA, 21 nt, synthetic construct
  source 1..21: mol_type = other RNA
caccgctcccataaagccatg

SEQ ID NO: 401 - RNA, 21 nt, synthetic construct
  source 1..21: mol_type = other RNA
cacctcctccatcttcatgct

SEQ ID NO: 402 - RNA, 21 nt, synthetic construct
  source 1..21: mol_type = other RNA
cacctttgcagaagacaggga

SEQ ID NO: 403 - RNA, 21 nt, synthetic construct
  source 1..21: mol_type = other RNA
cactcacctttgcagaagaca

SEQ ID NO: 404 - RNA, 21 nt, synthetic construct
  source 1..21: mol_type = other RNA
cactctcctgttttttcttct

SEQ ID NO: 405 - RNA, 21 nt, synthetic construct
  source 1..21: mol_type = other RNA
cagaagacagggatgaagaga

SEQ ID NO: 406 - RNA, 21 nt, synthetic construct
  source 1..21: mol_type = other RNA
cagcggcacaaggctcagctg

SEQ ID NO: 407 - RNA, 21 nt, synthetic construct
  source 1..21: mol_type = other RNA
cagctgaacctggctaccagg

SEQ ID NO: 408 - RNA, 21 nt, synthetic construct
  source 1..21: mol_type = other RNA
cagctgagccttgtgccgctg

SEQ ID NO: 409 - RNA, 21 nt, synthetic construct
  source 1..21: mol_type = other RNA
caggacctggccctgcactct

SEQ ID NO: 410 - RNA, 21 nt, synthetic construct
  source 1..21: mol_type = other RNA
caggagagtgcagggccaggt

SEQ ID NO: 411 - RNA, 21 nt, synthetic construct
  source 1..21: mol_type = other RNA
cagggatgaagagaagaaaaa

SEQ ID NO: 412 - RNA, 21 nt, synthetic construct
  source 1..21: mol_type = other RNA
cagggccaggtcctggtagcc

SEQ ID NO: 413 - RNA, 21 nt, synthetic construct
  source 1..21: mol_type = other RNA
caggtcctggtagccaggttc

SEQ ID NO: 414 - RNA, 21 nt, synthetic construct
  source 1..21: mol_type = other RNA
caggttcagctgagccttgtg

SEQ ID NO: 415 - RNA, 21 nt, synthetic construct
  source 1..21: mol_type = other RNA
cataaagccatggcttgcctt

SEQ ID NO: 416 - RNA, 21 nt, synthetic construct
  source 1..21: mol_type = other RNA
catccctgtcttctgcaaagg

SEQ ID NO: 417 - RNA, 21 nt, synthetic construct
  source 1..21: mol_type = other RNA
catcttcatgctccaaaagtc

SEQ ID NO: 418 - RNA, 21 nt, synthetic construct
  source 1..21: mol_type = other RNA
catgctccaaaagtctcactc

SEQ ID NO: 419 - RNA, 21 nt, synthetic construct
  source 1..21: mol_type = other RNA
catggcttgccttggatttca

SEQ ID NO: 420 - RNA, 21 nt, synthetic construct
  source 1..21: mol_type = other RNA
catggctttatgggagcggtg

SEQ ID NO: 421 - RNA, 21 nt, synthetic construct
  source 1..21: mol_type = other RNA
ccaaaagtctcactcaccttt

SEQ ID NO: 422 - RNA, 21 nt, synthetic construct
  source 1..21: mol_type = other RNA
ccaaggcaagccatggcttta

SEQ ID NO: 423 - RNA, 21 nt, synthetic construct
  source 1..21: mol_type = other RNA
ccaggacctggccctgcactc

SEQ ID NO: 424 - RNA, 21 nt, synthetic construct
  source 1..21: mol_type = other RNA
ccaggtcctggtagccaggtt

SEQ ID NO: 425 - RNA, 21 nt, synthetic construct
  source 1..21: mol_type = other RNA
ccaggttcagctgagccttgt

SEQ ID NO: 426 - RNA, 21 nt, synthetic construct
  source 1..21: mol_type = other RNA
ccataaagccatggcttgcct

SEQ ID NO: 427 - RNA, 21 nt, synthetic construct
  source 1..21: mol_type = other RNA
ccatcttcatgctccaaaagt

SEQ ID NO: 428 - RNA, 21 nt, synthetic construct
  source 1..21: mol_type = other RNA
ccatggcttgccttggatttc

SEQ ID NO: 429 - RNA, 21 nt, synthetic construct
  source 1..21: mol_type = other RNA
ccatggctttatgggagcggt

SEQ ID NO: 430 - RNA, 21 nt, synthetic construct
  source 1..21: mol_type = other RNA
cccataaagccatggcttgcc

SEQ ID NO: 431 - RNA, 21 nt, synthetic construct
  source 1..21: mol_type = other RNA
ccctgcactctcctgtttttt

SEQ ID NO: 432 - RNA, 21 nt, synthetic construct
  source 1..21: mol_type = other RNA
ccctgtcttctgcaaaggtga

SEQ ID NO: 433 - RNA, 21 nt, synthetic construct
  source 1..21: mol_type = other RNA
ccgctcccataaagccatggc

SEQ ID NO: 434 - RNA, 21 nt, synthetic construct
  source 1..21: mol_type = other RNA
ccgctgaaatccaaggcaagc

SEQ ID NO: 435 - RNA, 21 nt, synthetic construct
  source 1..21: mol_type = other RNA
cctccatcttcatgctccaaa

SEQ ID NO: 436 - RNA, 21 nt, synthetic construct
  source 1..21: mol_type = other RNA
cctcctccatcttcatgctcc

SEQ ID NO: 437 - RNA, 21 nt, synthetic construct
  source 1..21: mol_type = other RNA
cctgaacaccgctcccataaa

SEQ ID NO: 438 - RNA, 21 nt, synthetic construct
  source 1..21: mol_type = other RNA
cctgaagacctgaacaccgct

SEQ ID NO: 439 - RNA, 21 nt, synthetic construct
  source 1..21: mol_type = other RNA
cctgcactctcctgttttttc

SEQ ID NO: 440 - RNA, 21 nt, synthetic construct
  source 1..21: mol_type = other RNA
cctggccctgcactctcctgt

SEQ ID NO: 441 - RNA, 21 nt, synthetic construct
  source 1..21: mol_type = other RNA
cctggctaccaggacctggcc

SEQ ID NO: 442 - RNA, 21 nt, synthetic construct
  source 1..21: mol_type = other RNA
cctggtagccaggttcagctg

SEQ ID NO: 443 - RNA, 21 nt, synthetic construct
  source 1..21: mol_type = other RNA
cctgtcttctgcaaaggtgag

SEQ ID NO: 444 - RNA, 21 nt, synthetic construct
  source 1..21: mol_type = other RNA
cctgttttttcttctcttcat

SEQ ID NO: 445 - RNA, 21 nt, synthetic construct
  source 1..21: mol_type = other RNA
ccttggatttcagcggcacaa

SEQ ID NO: 446 - RNA, 21 nt, synthetic construct
  source 1..21: mol_type = other RNA
ccttgtgccgctgaaatccaa

SEQ ID NO: 447 - RNA, 21 nt, synthetic construct
  source 1..21: mol_type = other RNA
cctttgcagaagacagggatg

SEQ ID NO: 448 - RNA, 21 nt, synthetic construct
  source 1..21: mol_type = other RNA
cgctcccataaagccatggct

SEQ ID NO: 449 - RNA, 21 nt, synthetic construct
  source 1..21: mol_type = other RNA
cgctgaaatccaaggcaagcc

SEQ ID NO: 450 - RNA, 21 nt, synthetic construct
  source 1..21: mol_type = other RNA
cggcacaaggctcagctgaac

SEQ ID NO: 451 - RNA, 21 nt, synthetic construct
  source 1..21: mol_type = other RNA
ctaccaggacctggccctgca

SEQ ID NO: 452 - RNA, 21 nt, synthetic construct
  source 1..21: mol_type = other RNA
ctacttcctgaagacctgaac

SEQ ID NO: 453 - RNA, 21 nt, synthetic construct
  source 1..21: mol_type = other RNA
ctcacctttgcagaagacagg

SEQ ID NO: 454 - RNA, 21 nt, synthetic construct
  source 1..21: mol_type = other RNA
ctcactcacctttgcagaaga

SEQ ID NO: 455 - RNA, 21 nt, synthetic construct
  source 1..21: mol_type = other RNA
ctcagctgaacctggctacca

SEQ ID NO: 456 - RNA, 21 nt, synthetic construct
  source 1..21: mol_type = other RNA
ctccaaaagtctcactcacct

SEQ ID NO: 457 - RNA, 21 nt, synthetic construct
  source 1..21: mol_type = other RNA
ctccatcttcatgctccaaaa

SEQ ID NO: 458 - RNA, 21 nt, synthetic construct
  source 1..21: mol_type = other RNA
ctcccataaagccatggcttg

SEQ ID NO: 459 - RNA, 21 nt, synthetic construct
  source 1..21: mol_type = other RNA
ctcctccatcttcatgctcca

SEQ ID NO: 460 - RNA, 21 nt, synthetic construct
  source 1..21: mol_type = other RNA
ctcctgttttttcttctcttc

SEQ ID NO: 461 - RNA, 21 nt, synthetic construct
  source 1..21: mol_type = other RNA
ctctcctgttttttcttctct

SEQ ID NO: 462 - RNA, 21 nt, synthetic construct
  source 1..21: mol_type = other RNA
ctcttcatccctgtcttctgc

SEQ ID NO: 463 - RNA, 21 nt, synthetic construct
  source 1..21: mol_type = other RNA
ctgaaatccaaggcaagccat

SEQ ID NO: 464 - RNA, 21 nt, synthetic construct
  source 1..21: mol_type = other RNA
ctgaacaccgctcccataaag

SEQ ID NO: 465 - RNA, 21 nt, synthetic construct
  source 1..21: mol_type = other RNA
ctgaacctggctaccaggacc

SEQ ID NO: 466 - RNA, 21 nt, synthetic construct
  source 1..21: mol_type = other RNA
ctgaagacctgaacaccgctc

SEQ ID NO: 467 - RNA, 21 nt, synthetic construct
  source 1..21: mol_type = other RNA
ctgagccttgtgccgctgaaa

SEQ ID NO: 468 - RNA, 21 nt, synthetic construct
  source 1..21: mol_type = other RNA
ctgcaaaggtgagtgagactt

SEQ ID NO: 469 - RNA, 21 nt, synthetic construct
  source 1..21: mol_type = other RNA
ctgcactctcctgttttttct

SEQ ID NO: 470 - RNA, 21 nt, synthetic construct
  source 1..21: mol_type = other RNA
ctggccctgcactctcctgtt

SEQ ID NO: 471 - RNA, 21 nt, synthetic construct
  source 1..21: mol_type = other RNA
ctggctaccaggacctggccc

SEQ ID NO: 472 - RNA, 21 nt, synthetic construct
  source 1..21: mol_type = other RNA
ctggtagccaggttcagctga

SEQ ID NO: 473 - RNA, 21 nt, synthetic construct
  source 1..21: mol_type = other RNA
ctgtcttctgcaaaggtgagt

SEQ ID NO: 474 - RNA, 21 nt, synthetic construct
  source 1..21: mol_type = other RNA
ctgttttttcttctcttcatc

SEQ ID NO: 475 - RNA, 21 nt, synthetic construct
  source 1..21: mol_type = other RNA
cttcatccctgtcttctgcaa

SEQ ID NO: 476 - RNA, 21 nt, synthetic construct
  source 1..21: mol_type = other RNA
cttcatgctccaaaagtctca

SEQ ID NO: 477 - RNA, 21 nt, synthetic construct
  source 1..21: mol_type = other RNA
cttcctgaagacctgaacacc

SEQ ID NO: 478 - RNA, 21 nt, synthetic construct
  source 1..21: mol_type = other RNA
cttctcttcatccctgtcttc

SEQ ID NO: 479 - RNA, 21 nt, synthetic construct
  source 1..21: mol_type = other RNA
cttctgcaaaggtgagtgaga

SEQ ID NO: 480 - RNA, 21 nt, synthetic construct
  source 1..21: mol_type = other RNA
cttgccttggatttcagcggc

SEQ ID NO: 481 - RNA, 21 nt, synthetic construct
  source 1..21: mol_type = other RNA
cttggatttcagcggcacaag

SEQ ID NO: 482 - RNA, 21 nt, synthetic construct
  source 1..21: mol_type = other RNA
cttgtgccgctgaaatccaag

SEQ ID NO: 483 - RNA, 21 nt, synthetic construct
  source 1..21: mol_type = other RNA
ctttatgggagcggtgttcag

SEQ ID NO: 484 - RNA, 21 nt, synthetic construct
  source 1..21: mol_type = other RNA
ctttgcagaagacagggatga

SEQ ID NO: 485 - RNA, 21 nt, synthetic construct
  source 1..21: mol_type = other RNA
gaaaaaacaggagagtgcagg

SEQ ID NO: 486 - RNA, 21 nt, synthetic construct
  source 1..21: mol_type = other RNA
gaaatccaaggcaagccatgg

SEQ ID NO: 487 - RNA, 21 nt, synthetic construct
  source 1..21: mol_type = other RNA
gaacaccgctcccataaagcc

SEQ ID NO: 488 - RNA, 21 nt, synthetic construct
  source 1..21: mol_type = other RNA
gaacctggctaccaggacctg

SEQ ID NO: 489 - RNA, 21 nt, synthetic construct
  source 1..21: mol_type = other RNA
gaagaaaaaacaggagagtgc

SEQ ID NO: 490 - RNA, 21 nt, synthetic construct
  source 1..21: mol_type = other RNA
gaagacagggatgaagagaag

SEQ ID NO: 491 - RNA, 21 nt, synthetic construct
  source 1..21: mol_type = other RNA
gaagacctgaacaccgctccc

SEQ ID NO: 492 - RNA, 21 nt, synthetic construct
  source 1..21: mol_type = other RNA
gaagagaagaaaaaacaggag

SEQ ID NO: 493 - RNA, 21 nt, synthetic construct
  source 1..21: mol_type = other RNA
gacagggatgaagagaagaaa

SEQ ID NO: 494 - RNA, 21 nt, synthetic construct
  source 1..21: mol_type = other RNA
gacctgaacaccgctcccata

SEQ ID NO: 495 - RNA, 21 nt, synthetic construct
  source 1..21: mol_type = other RNA
gacctggccctgcactctcct

SEQ ID NO: 496 - RNA, 21 nt, synthetic construct
  source 1..21: mol_type = other RNA
gacttttggagcatgaagatg

SEQ ID NO: 497 - RNA, 21 nt, synthetic construct
  source 1..21: mol_type = other RNA
gagaagaaaaaacaggagagt

SEQ ID NO: 498 - RNA, 21 nt, synthetic construct
  source 1..21: mol_type = other RNA
gagacttttggagcatgaaga

SEQ ID NO: 499 - RNA, 21 nt, synthetic construct
  source 1..21: mol_type = other RNA
gagagtgcagggccaggtcct

SEQ ID NO: 500 - RNA, 21 nt, synthetic construct
  source 1..21: mol_type = other RNA
gagccttgtgccgctgaaatc

SEQ ID NO: 501 - RNA, 21 nt, synthetic construct
  source 1..21: mol_type = other RNA
gagcggtgttcaggtcttcag

SEQ ID NO: 502 - RNA, 21 nt, synthetic construct
  source 1..21: mol_type = other RNA
gagtgagacttttggagcatg

SEQ ID NO: 503 - RNA, 21 nt, synthetic construct
  source 1..21: mol_type = other RNA
gagtgcagggccaggtcctgg

SEQ ID NO: 504 - RNA, 21 nt, synthetic construct
  source 1..21: mol_type = other RNA
gatgaagagaagaaaaaacag

SEQ ID NO: 505 - RNA, 21 nt, synthetic construct
  source 1..21: mol_type = other RNA
gatttcagcggcacaaggctc

SEQ ID NO: 506 - RNA, 21 nt, synthetic construct
  source 1..21: mol_type = other RNA
gcaaaggtgagtgagactttt

SEQ ID NO: 507 - RNA, 21 nt, synthetic construct
  source 1..21: mol_type = other RNA
gcaagccatggctttatggga

SEQ ID NO: 508 - RNA, 21 nt, synthetic construct
  source 1..21: mol_type = other RNA
gcacaaggctcagctgaacct

SEQ ID NO: 509 - RNA, 21 nt, synthetic construct
  source 1..21: mol_type = other RNA
gcactctcctgttttttcttc

SEQ ID NO: 510 - RNA, 21 nt, synthetic construct
  source 1..21: mol_type = other RNA
gcagaagacagggatgaagag

SEQ ID NO: 511 - RNA, 21 nt, synthetic construct
  source 1..21: mol_type = other RNA
gcagggccaggtcctggtagc

SEQ ID NO: 512 - RNA, 21 nt, synthetic construct
  source 1..21: mol_type = other RNA
gccaggtcctggtagccaggt

SEQ ID NO: 513 - RNA, 21 nt, synthetic construct
  source 1..21: mol_type = other RNA
gccaggttcagctgagccttg

SEQ ID NO: 514 - RNA, 21 nt, synthetic construct
  source 1..21: mol_type = other RNA
gccatggcttgccttggattt

SEQ ID NO: 515 - RNA, 21 nt, synthetic construct
  source 1..21: mol_type = other RNA
gccatggctttatgggagcgg

SEQ ID NO: 516 - RNA, 21 nt, synthetic construct
  source 1..21: mol_type = other RNA
gccctgcactctcctgttttt

SEQ ID NO: 517 - RNA, 21 nt, synthetic construct
  source 1..21: mol_type = other RNA
gccgctgaaatccaaggcaag

SEQ ID NO: 518 - RNA, 21 nt, synthetic construct
  source 1..21: mol_type = other RNA
gccttggatttcagcggcaca

SEQ ID NO: 519 - RNA, 21 nt, synthetic construct
  source 1..21: mol_type = other RNA
gccttgtgccgctgaaatcca

SEQ ID NO: 520 - RNA, 21 nt, synthetic construct
  source 1..21: mol_type = other RNA
gcggcacaaggctcagctgaa

SEQ ID NO: 521 - RNA, 21 nt, synthetic construct
  source 1..21: mol_type = other RNA
gctaccaggacctggccctgc

SEQ ID NO: 522 - RNA, 21 nt, synthetic construct
  source 1..21: mol_type = other RNA
gctcagctgaacctggctacc

SEQ ID NO: 523 - RNA, 21 nt, synthetic construct
  source 1..21: mol_type = other RNA
gctccaaaagtctcactcacc

SEQ ID NO: 524 - RNA, 21 nt, synthetic construct
  source 1..21: mol_type = other RNA
gctcccataaagccatggctt

SEQ ID NO: 525 - RNA, 21 nt, synthetic construct
  source 1..21: mol_type = other RNA
gctgaaatccaaggcaagcca

SEQ ID NO: 526 - RNA, 21 nt, synthetic construct
  source 1..21: mol_type = other RNA
gctgaacctggctaccaggac

SEQ ID NO: 527 - RNA, 21 nt, synthetic construct
  source 1..21: mol_type = other RNA
gctgagccttgtgccgctgaa

SEQ ID NO: 528 - RNA, 21 nt, synthetic construct
  source 1..21: mol_type = other RNA
gcttgccttggatttcagcgg

SEQ ID NO: 529 - RNA, 21 nt, synthetic construct
  source 1..21: mol_type = other RNA
gctttatgggagcggtgttca

SEQ ID NO: 530 - RNA, 21 nt, synthetic construct
  source 1..21: mol_type = other RNA
ggacctggccctgcactctcc

SEQ ID NO: 531 - RNA, 21 nt, synthetic construct
  source 1..21: mol_type = other RNA
ggagagtgcagggccaggtcc

SEQ ID NO: 532 - RNA, 21 nt, synthetic construct
  source 1..21: mol_type = other RNA
ggagcggtgttcaggtcttca

SEQ ID NO: 533 - RNA, 21 nt, synthetic construct
  source 1..21: mol_type = other RNA
ggatgaagagaagaaaaaaca

SEQ ID NO: 534 - RNA, 21 nt, synthetic construct
  source 1..21: mol_type = other RNA
ggatttcagcggcacaaggct

SEQ ID NO: 535 - RNA, 21 nt, synthetic construct
  source 1..21: mol_type = other RNA
ggcaagccatggctttatggg

SEQ ID NO: 536 - RNA, 21 nt, synthetic construct
  source 1..21: mol_type = other RNA
ggcacaaggctcagctgaacc

SEQ ID NO: 537 - RNA, 21 nt, synthetic construct
  source 1..21: mol_type = other RNA
ggccaggtcctggtagccagg

SEQ ID NO: 538 - RNA, 21 nt, synthetic construct
  source 1..21: mol_type = other RNA
ggccctgcactctcctgtttt

SEQ ID NO: 539 - RNA, 21 nt, synthetic construct
  source 1..21: mol_type = other RNA
ggctaccaggacctggccctg

SEQ ID NO: 540 - RNA, 21 nt, synthetic construct
  source 1..21: mol_type = other RNA
ggctcagctgaacctggctac

SEQ ID NO: 541 - RNA, 21 nt, synthetic construct
  source 1..21: mol_type = other RNA
ggcttgccttggatttcagcg

SEQ ID NO: 542 - RNA, 21 nt, synthetic construct
  source 1..21: mol_type = other RNA
ggctttatgggagcggtgttc

SEQ ID NO: 543 - RNA, 21 nt, synthetic construct
  source 1..21: mol_type = other RNA
gggagcggtgttcaggtcttc

SEQ ID NO: 544 - RNA, 21 nt, synthetic construct
  source 1..21: mol_type = other RNA
gggatgaagagaagaaaaaac

SEQ ID NO: 545 - RNA, 21 nt, synthetic construct
  source 1..21: mol_type = other RNA
gggccaggtcctggtagccag

SEQ ID NO: 546 - RNA, 21 nt, synthetic construct
  source 1..21: mol_type = other RNA
ggtagccaggttcagctgagc

SEQ ID NO: 547 - RNA, 21 nt, synthetic construct
  source 1..21: mol_type = other RNA
ggtcctggtagccaggttcag

SEQ ID NO: 548 - RNA, 21 nt, synthetic construct
  source 1..21: mol_type = other RNA
ggtgagtgagacttttggagc

SEQ ID NO: 549 - RNA, 21 nt, synthetic construct
  source 1..21: mol_type = other RNA
ggttcagctgagccttgtgcc

SEQ ID NO: 550 - RNA, 21 nt, synthetic construct
  source 1..21: mol_type = other RNA
gtagccaggttcagctgagcc

SEQ ID NO: 551 - RNA, 21 nt, synthetic construct
  source 1..21: mol_type = other RNA
gtcctggtagccaggttcagc

SEQ ID NO: 552 - RNA, 21 nt, synthetic construct
  source 1..21: mol_type = other RNA
gtctcactcacctttgcagaa

SEQ ID NO: 553 - RNA, 21 nt, synthetic construct
  source 1..21: mol_type = other RNA
gtcttctgcaaaggtgagtga

SEQ ID NO: 554 - RNA, 21 nt, synthetic construct
  source 1..21: mol_type = other RNA
gtgagacttttggagcatgaa

SEQ ID NO: 555 - RNA, 21 nt, synthetic construct
  source 1..21: mol_type = other RNA
gtgagtgagacttttggagca

SEQ ID NO: 556 - RNA, 21 nt, synthetic construct
  source 1..21: mol_type = other RNA
gtgcagggccaggtcctggta

SEQ ID NO: 557 - RNA, 21 nt, synthetic construct
  source 1..21: mol_type = other RNA
gtgccgctgaaatccaaggca

SEQ ID NO: 558 - RNA, 21 nt, synthetic construct
  source 1..21: mol_type = other RNA
gttcagctgagccttgtgccg

SEQ ID NO: 559 - RNA, 21 nt, synthetic construct
  source 1..21: mol_type = other RNA
gttttttcttctcttcatccc

SEQ ID NO: 560 - RNA, 21 nt, synthetic construct
  source 1..21: mol_type = other RNA
taaagccatggcttgccttgg

SEQ ID NO: 561 - RNA, 21 nt, synthetic construct
  source 1..21: mol_type = other RNA
taccaggacctggccctgcac

SEQ ID NO: 562 - RNA, 21 nt, synthetic construct
  source 1..21: mol_type = other RNA
tacttcctgaagacctgaaca

SEQ ID NO: 563 - RNA, 21 nt, synthetic construct
  source 1..21: mol_type = other RNA
tagccaggttcagctgagcct

SEQ ID NO: 564 - RNA, 21 nt, synthetic construct
  source 1..21: mol_type = other RNA
tatgggagcggtgttcaggtc

SEQ ID NO: 565 - RNA, 21 nt, synthetic construct
  source 1..21: mol_type = other RNA
tcacctttgcagaagacaggg

SEQ ID NO: 566 - RNA, 21 nt, synthetic construct
  source 1..21: mol_type = other RNA
tcactcacctttgcagaagac

SEQ ID NO: 567 - RNA, 21 nt, synthetic construct
  source 1..21: mol_type = other RNA
tcagcggcacaaggctcagct

SEQ ID NO: 568 - RNA, 21 nt, synthetic construct
  source 1..21: mol_type = other RNA
tcagctgaacctggctaccag

SEQ ID NO: 569 - RNA, 21 nt, synthetic construct
  source 1..21: mol_type = other RNA
tcagctgagccttgtgccgct

SEQ ID NO: 570 - RNA, 21 nt, synthetic construct
  source 1..21: mol_type = other RNA
tcatccctgtcttctgcaaag

SEQ ID NO: 571 - RNA, 21 nt, synthetic construct
  source 1..21: mol_type = other RNA
tcatgctccaaaagtctcact

SEQ ID NO: 572 - RNA, 21 nt, synthetic construct
  source 1..21: mol_type = other RNA
tccaaaagtctcactcacctt

SEQ ID NO: 573 - RNA, 21 nt, synthetic construct
  source 1..21: mol_type = other RNA
tccaaggcaagccatggcttt

SEQ ID NO: 574 - RNA, 21 nt, synthetic construct
  source 1..21: mol_type = other RNA
tccatcttcatgctccaaaag

SEQ ID NO: 575 - RNA, 21 nt, synthetic construct
  source 1..21: mol_type = other RNA
tcccataaagccatggcttgc

SEQ ID NO: 576 - RNA, 21 nt, synthetic construct
  source 1..21: mol_type = other RNA
tccctgtcttctgcaaaggtg

SEQ ID NO: 577 - RNA, 21 nt, synthetic construct
  source 1..21: mol_type = other RNA
tcctccatcttcatgctccaa

SEQ ID NO: 578 - RNA, 21 nt, synthetic construct
  source 1..21: mol_type = other RNA
tcctgaagacctgaacaccgc

SEQ ID NO: 579 - RNA, 21 nt, synthetic construct
  source 1..21: mol_type = other RNA
tcctggtagccaggttcagct

SEQ ID NO: 580 - RNA, 21 nt, synthetic construct
  source 1..21: mol_type = other RNA
tcctgttttttcttctcttca

SEQ ID NO: 581 - RNA, 21 nt, synthetic construct
  source 1..21: mol_type = other RNA
tctacttcctgaagacctgaa

SEQ ID NO: 582 - RNA, 21 nt, synthetic construct
  source 1..21: mol_type = other RNA
tctcactcacctttgcagaag

SEQ ID NO: 583 - RNA, 21 nt, synthetic construct
  source 1..21: mol_type = other RNA
tctcctgttttttcttctctt

SEQ ID NO: 584 - RNA, 21 nt, synthetic construct
  source 1..21: mol_type = other RNA
tctcttcatccctgtcttctg

SEQ ID NO: 585 - RNA, 21 nt, synthetic construct
  source 1..21: mol_type = other RNA
tctgcaaaggtgagtgagact

SEQ ID NO: 586 - RNA, 21 nt, synthetic construct
  source 1..21: mol_type = other RNA
tcttcatccctgtcttctgca

SEQ ID NO: 587 - RNA, 21 nt, synthetic construct
  source 1..21: mol_type = other RNA
tcttcatgctccaaaagtctc

SEQ ID NO: 588 - RNA, 21 nt, synthetic construct
  source 1..21: mol_type = other RNA
tcttctcttcatccctgtctt

SEQ ID NO: 589 - RNA, 21 nt, synthetic construct
  source 1..21: mol_type = other RNA
tcttctgcaaaggtgagtgag

SEQ ID NO: 590 - RNA, 21 nt, synthetic construct
  source 1..21: mol_type = other RNA
tgaaatccaaggcaagccatg

SEQ ID NO: 591 - RNA, 21 nt, synthetic construct
  source 1..21: mol_type = other RNA
tgaacaccgctcccataaagc

SEQ ID NO: 592 - RNA, 21 nt, synthetic construct
  source 1..21: mol_type = other RNA
tgaacctggctaccaggacct

SEQ ID NO: 593 - RNA, 21 nt, synthetic construct
  source 1..21: mol_type = other RNA
tgaagacctgaacaccgctcc

SEQ ID NO: 594 - RNA, 21 nt, synthetic construct
  source 1..21: mol_type = other RNA
tgaagagaagaaaaaacagga

SEQ ID NO: 595 - RNA, 21 nt, synthetic construct
  source 1..21: mol_type = other RNA
tgagacttttggagcatgaag

SEQ ID NO: 596 - RNA, 21 nt, synthetic construct
  source 1..21: mol_type = other RNA
tgagccttgtgccgctgaaat

SEQ ID NO: 597 - RNA, 21 nt, synthetic construct
  source 1..21: mol_type = other RNA
tgagtgagacttttggagcat

SEQ ID NO: 598 - RNA, 21 nt, synthetic construct
  source 1..21: mol_type = other RNA
tgcaaaggtgagtgagacttt

SEQ ID NO: 599 - RNA, 21 nt, synthetic construct
  source 1..21: mol_type = other RNA
tgcactctcctgttttttctt

SEQ ID NO: 600 - RNA, 21 nt, synthetic construct
  source 1..21: mol_type = other RNA
tgcagaagacagggatgaaga

SEQ ID NO: 601 - RNA, 21 nt, synthetic construct
  source 1..21: mol_type = other RNA
tgcagggccaggtcctggtag

SEQ ID NO: 602 - RNA, 21 nt, synthetic construct
  source 1..21: mol_type = other RNA
tgccgctgaaatccaaggcaa

SEQ ID NO: 603 - RNA, 21 nt, synthetic construct
  source 1..21: mol_type = other RNA
tgccttggatttcagcggcac

SEQ ID NO: 604 - RNA, 21 nt, synthetic construct
  source 1..21: mol_type = other RNA
tgctccaaaagtctcactcac

SEQ ID NO: 605 - RNA, 21 nt, synthetic construct
  source 1..21: mol_type = other RNA
tggatttcagcggcacaaggc

SEQ ID NO: 606 - RNA, 21 nt, synthetic construct
  source 1..21: mol_type = other RNA
tggccctgcactctcctgttt

SEQ ID NO: 607 - RNA, 21 nt, synthetic construct
  source 1..21: mol_type = other RNA
tggctaccaggacctggccct

SEQ ID NO: 608 - RNA, 21 nt, synthetic construct
  source 1..21: mol_type = other RNA
tggcttgccttggatttcagc

SEQ ID NO: 609 - RNA, 21 nt, synthetic construct
  source 1..21: mol_type = other RNA
tggctttatgggagcggtgtt

SEQ ID NO: 610 - RNA, 21 nt, synthetic construct
  source 1..21: mol_type = other RNA
tgggagcggtgttcaggtctt

SEQ ID NO: 611 - RNA, 21 nt, synthetic construct
  source 1..21: mol_type = other RNA
tggtagccaggttcagctgag

SEQ ID NO: 612 - RNA, 21 nt, synthetic construct
  source 1..21: mol_type = other RNA
tgtcttctgcaaaggtgagtg

SEQ ID NO: 613 - RNA, 21 nt, synthetic construct
  source 1..21: mol_type = other RNA
tgtgccgctgaaatccaaggc

SEQ ID NO: 614 - RNA, 21 nt, synthetic construct
  source 1..21: mol_type = other RNA
tgttttttcttctcttcatcc

SEQ ID NO: 615 - RNA, 21 nt, synthetic construct
  source 1..21: mol_type = other RNA
ttatgggagcggtgttcaggt

SEQ ID NO: 616 - RNA, 21 nt, synthetic construct
  source 1..21: mol_type = other RNA
ttcagcggcacaaggctcagc

SEQ ID NO: 617 - RNA, 21 nt, synthetic construct
  source 1..21: mol_type = other RNA
ttcagctgagccttgtgccgc

SEQ ID NO: 618 - RNA, 21 nt, synthetic construct
  source 1..21: mol_type = other RNA
ttcatccctgtcttctgcaaa

SEQ ID NO: 619 - RNA, 21 nt, synthetic construct
  source 1..21: mol_type = other RNA
ttcatgctccaaaagtctcac

SEQ ID NO: 620 - RNA, 21 nt, synthetic construct
  source 1..21: mol_type = other RNA
ttcctgaagacctgaacaccg

SEQ ID NO: 621 - RNA, 21 nt, synthetic construct
  source 1..21: mol_type = other RNA
ttctcttcatccctgtcttct

SEQ ID NO: 622 - RNA, 21 nt, synthetic construct
  source 1..21: mol_type = other RNA
ttctgcaaaggtgagtgagac

SEQ ID NO: 623 - RNA, 21 nt, synthetic construct
  source 1..21: mol_type = other RNA
ttcttctcttcatccctgtct

SEQ ID NO: 624 - RNA, 21 nt, synthetic construct
  source 1..21: mol_type = other RNA
ttgcagaagacagggatgaag

SEQ ID NO: 625 - RNA, 21 nt, synthetic construct
  source 1..21: mol_type = other RNA
ttgccttggatttcagcggca

SEQ ID NO: 626 - RNA, 21 nt, synthetic construct
  source 1..21: mol_type = other RNA
ttggatttcagcggcacaagg

SEQ ID NO: 627 - RNA, 21 nt, synthetic construct
  source 1..21: mol_type = other RNA
ttgtgccgctgaaatccaagg

SEQ ID NO: 628 - RNA, 21 nt, synthetic construct
  source 1..21: mol_type = other RNA
tttatgggagcggtgttcagg

SEQ ID NO: 629 - RNA, 21 nt, synthetic construct
  source 1..21: mol_type = other RNA
tttcagcggcacaaggctcag

SEQ ID NO: 630 - RNA, 21 nt, synthetic construct
  source 1..21: mol_type = other RNA
tttcttctcttcatccctgtc

SEQ ID NO: 631 - RNA, 21 nt, synthetic construct
  source 1..21: mol_type = other RNA
tttgcagaagacagggatgaa

SEQ ID NO: 632 - RNA, 21 nt, synthetic construct
  source 1..21: mol_type = other RNA
ttttcttctcttcatccctgt

SEQ ID NO: 633 - RNA, 21 nt, synthetic construct
  source 1..21: mol_type = other RNA
tttttcttctcttcatccctg

SEQ ID NO: 634 - RNA, 21 nt, synthetic construct
  source 1..21: mol_type = other RNA
ttttttcttctcttcatccct

SEQ ID NO: 635 - RNA, 22 nt, synthetic construct
  source 1..22: mol_type = other RNA
aaaaaacaggagagtgcagggc

SEQ ID NO: 636 - RNA, 22 nt, synthetic construct
  source 1..22: mol_type = other RNA
aaaaacaggagagtgcagggcc

SEQ ID NO: 637 - RNA, 22 nt, synthetic construct
  source 1..22: mol_type = other RNA
aaaacaggagagtgcagggcca

SEQ ID NO: 638 - RNA, 22 nt, synthetic construct
  source 1..22: mol_type = other RNA
aaaagtctcactcacctttgca

SEQ ID NO: 639 - RNA, 22 nt, synthetic construct
  source 1..22: mol_type = other RNA
aaacaggagagtgcagggccag

SEQ ID NO: 640 - RNA, 22 nt, synthetic construct
  source 1..22: mol_type = other RNA
aaagccatggcttgccttggat

SEQ ID NO: 641 - RNA, 22 nt, synthetic construct
  source 1..22: mol_type = other RNA
aaaggtgagtgagacttttgga

SEQ ID NO: 642 - RNA, 22 nt, synthetic construct
  source 1..22: mol_type = other RNA
aaagtctcactcacctttgcag

SEQ ID NO: 643 - RNA, 22 nt, synthetic construct
  source 1..22: mol_type = other RNA
aaatccaaggcaagccatggct

SEQ ID NO: 644 - RNA, 22 nt, synthetic construct
  source 1..22: mol_type = other RNA
aacaccgctcccataaagccat

SEQ ID NO: 645 - RNA, 22 nt, synthetic construct
  source 1..22: mol_type = other RNA
aacaggagagtgcagggccagg

SEQ ID NO: 646 - RNA, 22 nt, synthetic construct
  source 1..22: mol_type = other RNA
aacctggctaccaggacctggc

SEQ ID NO: 647 - RNA, 22 nt, synthetic construct
  source 1..22: mol_type = other RNA
aagaaaaaacaggagagtgcag

SEQ ID NO: 648 - RNA, 22 nt, synthetic construct
  source 1..22: mol_type = other RNA
aagacagggatgaagagaagaa

SEQ ID NO: 649 - RNA, 22 nt, synthetic construct
  source 1..22: mol_type = other RNA
aagacctgaacaccgctcccat

SEQ ID NO: 650 - RNA, 22 nt, synthetic construct
  source 1..22: mol_type = other RNA
aagagaagaaaaaacaggagag

SEQ ID NO: 651 - RNA, 22 nt, synthetic construct
  source 1..22: mol_type = other RNA
aagccatggcttgccttggatt

SEQ ID NO: 652 - RNA, 22 nt, synthetic construct
  source 1..22: mol_type = other RNA
aagccatggctttatgggagcg

SEQ ID NO: 653 - RNA, 22 nt, synthetic construct
  source 1..22: mol_type = other RNA
aaggcaagccatggctttatgg

SEQ ID NO: 654 - RNA, 22 nt, synthetic construct
  source 1..22: mol_type = other RNA
aaggctcagctgaacctggcta

SEQ ID NO: 655 - RNA, 22 nt, synthetic construct
  source 1..22: mol_type = other RNA
aaggtgagtgagacttttggag

SEQ ID NO: 656 - RNA, 22 nt, synthetic construct
  source 1..22: mol_type = other RNA
aagtctcactcacctttgcaga

SEQ ID NO: 657 - RNA, 22 nt, synthetic construct
  source 1..22: mol_type = other RNA
aatccaaggcaagccatggctt

SEQ ID NO: 658 - RNA, 22 nt, synthetic construct
  source 1..22: mol_type = other RNA
acaaggctcagctgaacctggc

SEQ ID NO: 659 - RNA, 22 nt, synthetic construct
  source 1..22: mol_type = other RNA
acaccgctcccataaagccatg

SEQ ID NO: 660 - RNA, 22 nt, synthetic construct
  source 1..22: mol_type = other RNA
acaggagagtgcagggccaggt

SEQ ID NO: 661 - RNA, 22 nt, synthetic construct
  source 1..22: mol_type = other RNA
acagggatgaagagaagaaaaa

SEQ ID NO: 662 - RNA, 22 nt, synthetic construct
  source 1..22: mol_type = other RNA
accaggacctggccctgcactc

SEQ ID NO: 663 - RNA, 22 nt, synthetic construct
  source 1..22: mol_type = other RNA
accgctcccataaagccatggc

SEQ ID NO: 664 - RNA, 22 nt, synthetic construct
  source 1..22: mol_type = other RNA
acctcctccatcttcatgctcc

SEQ ID NO: 665 - RNA, 22 nt, synthetic construct
  source 1..22: mol_type = other RNA
acctgaacaccgctcccataaa

SEQ ID NO: 666 - RNA, 22 nt, synthetic construct
  source 1..22: mol_type = other RNA
acctggccctgcactctcctgt

SEQ ID NO: 667 - RNA, 22 nt, synthetic construct
  source 1..22: mol_type = other RNA
acctggctaccaggacctggcc

SEQ ID NO: 668 - RNA, 22 nt, synthetic construct
  source 1..22: mol_type = other RNA
acctttgcagaagacagggatg

SEQ ID NO: 669 - RNA, 22 nt, synthetic construct
  source 1..22: mol_type = other RNA
actcacctttgcagaagacagg

SEQ ID NO: 670 - RNA, 22 nt, synthetic construct
  source 1..22: mol_type = other RNA
actctcctgttttttcttctct

SEQ ID NO: 671 - RNA, 22 nt, synthetic construct
  source 1..22: mol_type = other RNA
acttcctgaagacctgaacacc

SEQ ID NO: 672 - RNA, 22 nt, synthetic construct
  source 1..22: mol_type = other RNA
agaaaaaacaggagagtgcagg

SEQ ID NO: 673 - RNA, 22 nt, synthetic construct
  source 1..22: mol_type = other RNA
agaagaaaaaacaggagagtgc

SEQ ID NO: 674 - RNA, 22 nt, synthetic construct
  source 1..22: mol_type = other RNA
agaagacagggatgaagagaag

SEQ ID NO: 675 - RNA, 22 nt, synthetic construct
  source 1..22: mol_type = other RNA
agacagggatgaagagaagaaa

SEQ ID NO: 676 - RNA, 22 nt, synthetic construct
  source 1..22: mol_type = other RNA
agacctgaacaccgctcccata

SEQ ID NO: 677 - RNA, 22 nt, synthetic construct
  source 1..22: mol_type = other RNA
agacttttggagcatgaagatg

SEQ ID NO: 678 - RNA, 22 nt, synthetic construct
  source 1..22: mol_type = other RNA
agagaagaaaaaacaggagagt

SEQ ID NO: 679 - RNA, 22 nt, synthetic construct
  source 1..22: mol_type = other RNA
agagtgcagggccaggtcctgg

SEQ ID NO: 680 - RNA, 22 nt, synthetic construct
  source 1..22: mol_type = other RNA
agccaggttcagctgagccttg

SEQ ID NO: 681 - RNA, 22 nt, synthetic construct
  source 1..22: mol_type = other RNA
agccatggcttgccttggattt

SEQ ID NO: 682 - RNA, 22 nt, synthetic construct
  source 1..22: mol_type = other RNA
agccatggctttatgggagcgg

SEQ ID NO: 683 - RNA, 22 nt, synthetic construct
  source 1..22: mol_type = other RNA
agccttgtgccgctgaaatcca

SEQ ID NO: 684 - RNA, 22 nt, synthetic construct
  source 1..22: mol_type = other RNA
agcggcacaaggctcagctgaa

SEQ ID NO: 685 - RNA, 22 nt, synthetic construct
  source 1..22: mol_type = other RNA
agctgaacctggctaccaggac

SEQ ID NO: 686 - RNA, 22 nt, synthetic construct
  source 1..22: mol_type = other RNA
agctgagccttgtgccgctgaa

SEQ ID NO: 687 - RNA, 22 nt, synthetic construct
  source 1..22: mol_type = other RNA
aggacctggccctgcactctcc

SEQ ID NO: 688 - RNA, 22 nt, synthetic construct
  source 1..22: mol_type = other RNA
aggagagtgcagggccaggtcc

SEQ ID NO: 689 - RNA, 22 nt, synthetic construct
  source 1..22: mol_type = other RNA
aggcaagccatggctttatggg

SEQ ID NO: 690 - RNA, 22 nt, synthetic construct
  source 1..22: mol_type = other RNA
aggctcagctgaacctggctac

SEQ ID NO: 691 - RNA, 22 nt, synthetic construct
  source 1..22: mol_type = other RNA
agggatgaagagaagaaaaaac

SEQ ID NO: 692 - RNA, 22 nt, synthetic construct
  source 1..22: mol_type = other RNA
agggccaggtcctggtagccag

SEQ ID NO: 693 - RNA, 22 nt, synthetic construct
  source 1..22: mol_type = other RNA
aggtcctggtagccaggttcag

SEQ ID NO: 694 - RNA, 22 nt, synthetic construct
  source 1..22: mol_type = other RNA
aggtgagtgagacttttggagc

SEQ ID NO: 695 - RNA, 22 nt, synthetic construct
  source 1..22: mol_type = other RNA
aggttcagctgagccttgtgcc

SEQ ID NO: 696 - RNA, 22 nt, synthetic construct
  source 1..22: mol_type = other RNA
agtctcactcacctttgcagaa

SEQ ID NO: 697 - RNA, 22 nt, synthetic construct
  source 1..22: mol_type = other RNA
agtgagacttttggagcatgaa

SEQ ID NO: 698 - RNA, 22 nt, synthetic construct
  source 1..22: mol_type = other RNA
agtgcagggccaggtcctggta

SEQ ID NO: 699 - RNA, 22 nt, synthetic construct
  source 1..22: mol_type = other RNA
ataaagccatggcttgccttgg

SEQ ID NO: 700 - RNA, 22 nt, synthetic construct
  source 1..22: mol_type = other RNA
atccaaggcaagccatggcttt

SEQ ID NO: 701 - RNA, 22 nt, synthetic construct
  source 1..22: mol_type = other RNA
atccctgtcttctgcaaaggtg

SEQ ID NO: 702 - RNA, 22 nt, synthetic construct
  source 1..22: mol_type = other RNA
atcttcatgctccaaaagtctc

SEQ ID NO: 703 - RNA, 22 nt, synthetic construct
  source 1..22: mol_type = other RNA
atgaagagaagaaaaaacagga

SEQ ID NO: 704 - RNA, 22 nt, synthetic construct
  source 1..22: mol_type = other RNA
atgctccaaaagtctcactcac

SEQ ID NO: 705 - RNA, 22 nt, synthetic construct
  source 1..22: mol_type = other RNA
atggcttgccttggatttcagc

SEQ ID NO: 706 - RNA, 22 nt, synthetic construct
  source 1..22: mol_type = other RNA
atggctttatgggagcggtgtt

SEQ ID NO: 707 - RNA, 22 nt, synthetic construct
  source 1..22: mol_type = other RNA
atgggagcggtgttcaggtctt

SEQ ID NO: 708 - RNA, 22 nt, synthetic construct
  source 1..22: mol_type = other RNA
atttcagcggcacaaggctcag

SEQ ID NO: 709 - RNA, 22 nt, synthetic construct
  source 1..22: mol_type = other RNA
caaaagtctcactcacctttgc

SEQ ID NO: 710 - RNA, 22 nt, synthetic construct
  source 1..22: mol_type = other RNA
caaaggtgagtgagacttttgg

SEQ ID NO: 711 - RNA, 22 nt, synthetic construct
  source 1..22: mol_type = other RNA
caagccatggctttatgggagc

SEQ ID NO: 712 - RNA, 22 nt, synthetic construct
  source 1..22: mol_type = other RNA
caaggcaagccatggctttatg

SEQ ID NO: 713 - RNA, 22 nt, synthetic construct
  source 1..22: mol_type = other RNA
caaggctcagctgaacctggct

SEQ ID NO: 714 - RNA, 22 nt, synthetic construct
  source 1..22: mol_type = other RNA
cacaaggctcagctgaacctgg

SEQ ID NO: 715 - RNA, 22 nt, synthetic construct
  source 1..22: mol_type = other RNA
caccgctcccataaagccatgg

SEQ ID NO: 716 - RNA, 22 nt, synthetic construct
  source 1..22: mol_type = other RNA
cacctcctccatcttcatgctc

SEQ ID NO: 717 - RNA, 22 nt, synthetic construct
  source 1..22: mol_type = other RNA
cacctttgcagaagacagggat

SEQ ID NO: 718 - RNA, 22 nt, synthetic construct
  source 1..22: mol_type = other RNA
cactcacctttgcagaagacag

SEQ ID NO: 719 - RNA, 22 nt, synthetic construct
  source 1..22: mol_type = other RNA
cactctcctgttttttcttctc

SEQ ID NO: 720 - RNA, 22 nt, synthetic construct
  source 1..22: mol_type = other RNA
cagaagacagggatgaagagaa

SEQ ID NO: 721 - RNA, 22 nt, synthetic construct
  source 1..22: mol_type = other RNA
cagcggcacaaggctcagctga

SEQ ID NO: 722 - RNA, 22 nt, synthetic construct
  source 1..22: mol_type = other RNA
cagctgaacctggctaccagga

SEQ ID NO: 723 - RNA, 22 nt, synthetic construct
  source 1..22: mol_type = other RNA
cagctgagccttgtgccgctga

SEQ ID NO: 724 - RNA, 22 nt, synthetic construct
  source 1..22: mol_type = other RNA
caggacctggccctgcactctc

SEQ ID NO: 725 - RNA, 22 nt, synthetic construct
  source 1..22: mol_type = other RNA
caggagagtgcagggccaggtc

SEQ ID NO: 726 - RNA, 22 nt, synthetic construct
  source 1..22: mol_type = other RNA
cagggatgaagagaagaaaaaa

SEQ ID NO: 727 - RNA, 22 nt, synthetic construct
  source 1..22: mol_type = other RNA
cagggccaggtcctggtagcca

SEQ ID NO: 728 - RNA, 22 nt, synthetic construct
  source 1..22: mol_type = other RNA
caggtcctggtagccaggttca

SEQ ID NO: 729 - RNA, 22 nt, synthetic construct
  source 1..22: mol_type = other RNA
caggttcagctgagccttgtgc

SEQ ID NO: 730 - RNA, 22 nt, synthetic construct
  source 1..22: mol_type = other RNA
cataaagccatggcttgccttg

SEQ ID NO: 731 - RNA, 22 nt, synthetic construct
  source 1..22: mol_type = other RNA
catccctgtcttctgcaaaggt

SEQ ID NO: 732 - RNA, 22 nt, synthetic construct
  source 1..22: mol_type = other RNA
catcttcatgctccaaaagtct

SEQ ID NO: 733 - RNA, 22 nt, synthetic construct
  source 1..22: mol_type = other RNA
catgctccaaaagtctcactca

SEQ ID NO: 734 - RNA, 22 nt, synthetic construct
  source 1..22: mol_type = other RNA
catggcttgccttggatttcag

SEQ ID NO: 735 - RNA, 22 nt, synthetic construct
  source 1..22: mol_type = other RNA
catggctttatgggagcggtgt

SEQ ID NO: 736 - RNA, 22 nt, synthetic construct
  source 1..22: mol_type = other RNA
ccaaaagtctcactcacctttg

SEQ ID NO: 737 - RNA, 22 nt, synthetic construct
  source 1..22: mol_type = other RNA
ccaaggcaagccatggctttat

SEQ ID NO: 738 - RNA, 22 nt, synthetic construct
  source 1..22: mol_type = other RNA
ccaggacctggccctgcactct

SEQ ID NO: 739 - RNA, 22 nt, synthetic construct
  source 1..22: mol_type = other RNA
ccaggtcctggtagccaggttc

SEQ ID NO: 740 - RNA, 22 nt, synthetic construct
  source 1..22: mol_type = other RNA
ccaggttcagctgagccttgtg

SEQ ID NO: 741 - RNA, 22 nt, synthetic construct
  source 1..22: mol_type = other RNA
ccataaagccatggcttgcctt

SEQ ID NO: 742 - RNA, 22 nt, synthetic construct
  source 1..22: mol_type = other RNA
ccatcttcatgctccaaaagtc

SEQ ID NO: 743 - RNA, 22 nt, synthetic construct
  source 1..22: mol_type = other RNA
ccatggcttgccttggatttca

SEQ ID NO: 744 - RNA, 22 nt, synthetic construct
  source 1..22: mol_type = other RNA
ccatggctttatgggagcggtg

SEQ ID NO: 745 - RNA, 22 nt, synthetic construct
  source 1..22: mol_type = other RNA
cccataaagccatggcttgcct

SEQ ID NO: 746 - RNA, 22 nt, synthetic construct
  source 1..22: mol_type = other RNA
ccctgcactctcctgttttttc

SEQ ID NO: 747 - RNA, 22 nt, synthetic construct
  source 1..22: mol_type = other RNA
ccctgtcttctgcaaaggtgag

SEQ ID NO: 748 - RNA, 22 nt, synthetic construct
  source 1..22: mol_type = other RNA
ccgctcccataaagccatggct

SEQ ID NO: 749 - RNA, 22 nt, synthetic construct
  source 1..22: mol_type = other RNA
ccgctgaaatccaaggcaagcc

SEQ ID NO: 750 - RNA, 22 nt, synthetic construct
  source 1..22: mol_type = other RNA
cctccatcttcatgctccaaaa

SEQ ID NO: 751 - RNA, 22 nt, synthetic construct
  source 1..22: mol_type = other RNA
cctcctccatcttcatgctcca

SEQ ID NO: 752 - RNA, 22 nt, synthetic construct
  source 1..22: mol_type = other RNA
cctgaacaccgctcccataaag

SEQ ID NO: 753 - RNA, 22 nt, synthetic construct
  source 1..22: mol_type = other RNA
cctgaagacctgaacaccgctc

SEQ ID NO: 754 - RNA, 22 nt, synthetic construct
  source 1..22: mol_type = other RNA
cctgcactctcctgttttttct

SEQ ID NO: 755 - RNA, 22 nt, synthetic construct
  source 1..22: mol_type = other RNA
cctggccctgcactctcctgtt

SEQ ID NO: 756 - RNA, 22 nt, synthetic construct
  source 1..22: mol_type = other RNA
cctggctaccaggacctggccc

SEQ ID NO: 757 - RNA, 22 nt, synthetic construct
  source 1..22: mol_type = other RNA
cctggtagccaggttcagctga

SEQ ID NO: 758 - RNA, 22 nt, synthetic construct
  source 1..22: mol_type = other RNA
cctgtcttctgcaaaggtgagt

SEQ ID NO: 759 - RNA, 22 nt, synthetic construct
  source 1..22: mol_type = other RNA
cctgttttttcttctcttcatc

SEQ ID NO: 760 - RNA, 22 nt, synthetic construct
  source 1..22: mol_type = other RNA
ccttggatttcagcggcacaag

SEQ ID NO: 761 - RNA, 22 nt, synthetic construct
  source 1..22: mol_type = other RNA
ccttgtgccgctgaaatccaag

SEQ ID NO: 762 - RNA, 22 nt, synthetic construct
  source 1..22: mol_type = other RNA
cctttgcagaagacagggatga

SEQ ID NO: 763 - RNA, 22 nt, synthetic construct
  source 1..22: mol_type = other RNA
cgctcccataaagccatggctt

SEQ ID NO: 764 - RNA, 22 nt, synthetic construct
  source 1..22: mol_type = other RNA
cgctgaaatccaaggcaagcca

SEQ ID NO: 765 - RNA, 22 nt, synthetic construct
  source 1..22: mol_type = other RNA
cggcacaaggctcagctgaacc

SEQ ID NO: 766 - RNA, 22 nt, synthetic construct
  source 1..22: mol_type = other RNA
ctaccaggacctggccctgcac

SEQ ID NO: 767 - RNA, 22 nt, synthetic construct
  source 1..22: mol_type = other RNA
ctacttcctgaagacctgaaca

SEQ ID NO: 768 - RNA, 22 nt, synthetic construct
  source 1..22: mol_type = other RNA
ctcacctttgcagaagacaggg

SEQ ID NO: 769 - RNA, 22 nt, synthetic construct
  source 1..22: mol_type = other RNA
ctcactcacctttgcagaagac

SEQ ID NO: 770 - RNA, 22 nt, synthetic construct
  source 1..22: mol_type = other RNA
ctcagctgaacctggctaccag

SEQ ID NO: 771 - RNA, 22 nt, synthetic construct
  source 1..22: mol_type = other RNA
ctccaaaagtctcactcacctt

SEQ ID NO: 772 - RNA, 22 nt, synthetic construct
  source 1..22: mol_type = other RNA
ctccatcttcatgctccaaaag

SEQ ID NO: 773 - RNA, 22 nt, synthetic construct
  source 1..22: mol_type = other RNA
ctcccataaagccatggcttgc

SEQ ID NO: 774 - RNA, 22 nt, synthetic construct
  source 1..22: mol_type = other RNA
ctcctccatcttcatgctccaa

SEQ ID NO: 775 - RNA, 22 nt, synthetic construct
  source 1..22: mol_type = other RNA
ctcctgttttttcttctcttca

SEQ ID NO: 776 - RNA, 22 nt, synthetic construct
  source 1..22: mol_type = other RNA
ctctcctgttttttcttctctt

SEQ ID NO: 777 - RNA, 22 nt, synthetic construct
  source 1..22: mol_type = other RNA
ctcttcatccctgtcttctgca

SEQ ID NO: 778 - RNA, 22 nt, synthetic construct
  source 1..22: mol_type = other RNA
ctgaaatccaaggcaagccatg

SEQ ID NO: 779 - RNA, 22 nt, synthetic construct
  source 1..22: mol_type = other RNA
ctgaacaccgctcccataaagc

SEQ ID NO: 780 - RNA, 22 nt, synthetic construct
  source 1..22: mol_type = other RNA
ctgaacctggctaccaggacct

SEQ ID NO: 781 - RNA, 22 nt, synthetic construct
  source 1..22: mol_type = other RNA
ctgaagacctgaacaccgctcc

SEQ ID NO: 782 - RNA, 22 nt, synthetic construct
  source 1..22: mol_type = other RNA
ctgagccttgtgccgctgaaat

SEQ ID NO: 783 - RNA, 22 nt, synthetic construct
  source 1..22: mol_type = other RNA
ctgcaaaggtgagtgagacttt

SEQ ID NO: 784 - RNA, 22 nt, synthetic construct
  source 1..22: mol_type = other RNA
ctgcactctcctgttttttctt

SEQ ID NO: 785 - RNA, 22 nt, synthetic construct
  source 1..22: mol_type = other RNA
ctggccctgcactctcctgttt

SEQ ID NO: 786 - RNA, 22 nt, synthetic construct
  source 1..22: mol_type = other RNA
ctggctaccaggacctggccct

SEQ ID NO: 787 - RNA, 22 nt, synthetic construct
  source 1..22: mol_type = other RNA
ctggtagccaggttcagctgag

SEQ ID NO: 788 - RNA, 22 nt, synthetic construct
  source 1..22: mol_type = other RNA
ctgtcttctgcaaaggtgagtg

SEQ ID NO: 789 - RNA, 22 nt, synthetic construct
  source 1..22: mol_type = other RNA
ctgttttttcttctcttcatcc

SEQ ID NO: 790 - RNA, 22 nt, synthetic construct
  source 1..22: mol_type = other RNA
cttcatccctgtcttctgcaaa

SEQ ID NO: 791 - RNA, 22 nt, synthetic construct
  source 1..22: mol_type = other RNA
cttcatgctccaaaagtctcac

SEQ ID NO: 792 - RNA, 22 nt, synthetic construct
  source 1..22: mol_type = other RNA
cttcctgaagacctgaacaccg

SEQ ID NO: 793 - RNA, 22 nt, synthetic construct
  source 1..22: mol_type = other RNA
cttctcttcatccctgtcttct

SEQ ID NO: 794 - RNA, 22 nt, synthetic construct
  source 1..22: mol_type = other RNA
cttctgcaaaggtgagtgagac

SEQ ID NO: 795 - RNA, 22 nt, synthetic construct
  source 1..22: mol_type = other RNA
cttgccttggatttcagcggca

SEQ ID NO: 796 - RNA, 22 nt, synthetic construct
  source 1..22: mol_type = other RNA
cttggatttcagcggcacaagg

SEQ ID NO: 797 - RNA, 22 nt, synthetic construct
  source 1..22: mol_type = other RNA
cttgtgccgctgaaatccaagg

SEQ ID NO: 798 - RNA, 22 nt, synthetic construct
  source 1..22: mol_type = other RNA
ctttatgggagcggtgttcagg

SEQ ID NO: 799 - RNA, 22 nt, synthetic construct
  source 1..22: mol_type = other RNA
ctttgcagaagacagggatgaa

SEQ ID NO: 800 - RNA, 22 nt, synthetic construct
  source 1..22: mol_type = other RNA
gaaaaaacaggagagtgcaggg

SEQ ID NO: 801 - RNA, 22 nt, synthetic construct
  source 1..22: mol_type = other RNA
gaaatccaaggcaagccatggc

SEQ ID NO: 802 - RNA, 22 nt, synthetic construct
  source 1..22: mol_type = other RNA
gaacaccgctcccataaagcca

SEQ ID NO: 803 - RNA, 22 nt, synthetic construct
  source 1..22: mol_type = other RNA
gaacctggctaccaggacctgg

SEQ ID NO: 804 - RNA, 22 nt, synthetic construct
  source 1..22: mol_type = other RNA
gaagaaaaaacaggagagtgca

SEQ ID NO: 805 - RNA, 22 nt, synthetic construct
  source 1..22: mol_type = other RNA
gaagacagggatgaagagaaga

SEQ ID NO: 806 - RNA, 22 nt, synthetic construct
  source 1..22: mol_type = other RNA
gaagacctgaacaccgctccca

SEQ ID NO: 807 - RNA, 22 nt, synthetic construct
  source 1..22: mol_type = other RNA
gaagagaagaaaaaacaggaga

SEQ ID NO: 808 - RNA, 22 nt, synthetic construct
  source 1..22: mol_type = other RNA
gacagggatgaagagaagaaaa

SEQ ID NO: 809 - RNA, 22 nt, synthetic construct
  source 1..22: mol_type = other RNA
gacctgaacaccgctcccataa

SEQ ID NO: 810 - RNA, 22 nt, synthetic construct
  source 1..22: mol_type = other RNA
gacctggccctgcactctcctg

SEQ ID NO: 811 - RNA, 22 nt, synthetic construct
  source 1..22: mol_type = other RNA
gacttttggagcatgaagatgg

SEQ ID NO: 812 - RNA, 22 nt, synthetic construct
  source 1..22: mol_type = other RNA
gagaagaaaaaacaggagagtg

SEQ ID NO: 813 - RNA, 22 nt, synthetic construct
  source 1..22: mol_type = other RNA
gagacttttggagcatgaagat

SEQ ID NO: 814 - RNA, 22 nt, synthetic construct
  source 1..22: mol_type = other RNA
gagagtgcagggccaggtcctg

SEQ ID NO: 815 - RNA, 22 nt, synthetic construct
  source 1..22: mol_type = other RNA
gagccttgtgccgctgaaatcc

SEQ ID NO: 816 - RNA, 22 nt, synthetic construct
  source 1..22: mol_type = other RNA
gagtgagacttttggagcatga

SEQ ID NO: 817 - RNA, 22 nt, synthetic construct
  source 1..22: mol_type = other RNA
gagtgcagggccaggtcctggt

SEQ ID NO: 818 - RNA, 22 nt, synthetic construct
  source 1..22: mol_type = other RNA
gatgaagagaagaaaaaacagg

SEQ ID NO: 819 - RNA, 22 nt, synthetic construct
  source 1..22: mol_type = other RNA
gatttcagcggcacaaggctca

SEQ ID NO: 820 - RNA, 22 nt, synthetic construct
  source 1..22: mol_type = other RNA
gcaaaggtgagtgagacttttg

SEQ ID NO: 821 - RNA, 22 nt, synthetic construct
  source 1..22: mol_type = other RNA
gcaagccatggctttatgggag

SEQ ID NO: 822 - RNA, 22 nt, synthetic construct
  source 1..22: mol_type = other RNA
gcacaaggctcagctgaacctg

SEQ ID NO: 823 - RNA, 22 nt, synthetic construct
  source 1..22: mol_type = other RNA
gcactctcctgttttttcttct

SEQ ID NO: 824 - RNA, 22 nt, synthetic construct
  source 1..22: mol_type = other RNA
gcagaagacagggatgaagaga

SEQ ID NO: 825 - RNA, 22 nt, synthetic construct
  source 1..22: mol_type = other RNA
gcagggccaggtcctggtagcc

SEQ ID NO: 826 - RNA, 22 nt, synthetic construct
  source 1..22: mol_type = other RNA
gccaggtcctggtagccaggtt

SEQ ID NO: 827 - RNA, 22 nt, synthetic construct
  source 1..22: mol_type = other RNA
gccaggttcagctgagccttgt

SEQ ID NO: 828 - RNA, 22 nt, synthetic construct
  source 1..22: mol_type = other RNA
gccatggcttgccttggatttc

SEQ ID NO: 829 - RNA, 22 nt, synthetic construct
  source 1..22: mol_type = other RNA
gccatggctttatgggagcggt

SEQ ID NO: 830 - RNA, 22 nt, synthetic construct
  source 1..22: mol_type = other RNA
gccctgcactctcctgtttttt

SEQ ID NO: 831 - RNA, 22 nt, synthetic construct
  source 1..22: mol_type = other RNA
gccgctgaaatccaaggcaagc

SEQ ID NO: 832 - RNA, 22 nt, synthetic construct
  source 1..22: mol_type = other RNA
gccttggatttcagcggcacaa

SEQ ID NO: 833 - RNA, 22 nt, synthetic construct
  source 1..22: mol_type = other RNA
gccttgtgccgctgaaatccaa

SEQ ID NO: 834 - RNA, 22 nt, synthetic construct
  source 1..22: mol_type = other RNA
gcggcacaaggctcagctgaac

SEQ ID NO: 835 - RNA, 22 nt, synthetic construct
  source 1..22: mol_type = other RNA
gctaccaggacctggccctgca

SEQ ID NO: 836 - RNA, 22 nt, synthetic construct
  source 1..22: mol_type = other RNA
gctcagctgaacctggctacca

SEQ ID NO: 837 - RNA, 22 nt, synthetic construct
  source 1..22: mol_type = other RNA
gctccaaaagtctcactcacct

SEQ ID NO: 838 - RNA, 22 nt, synthetic construct
  source 1..22: mol_type = other RNA
gctcccataaagccatggcttg

SEQ ID NO: 839 - RNA, 22 nt, synthetic construct
  source 1..22: mol_type = other RNA
gctgaaatccaaggcaagccat

SEQ ID NO: 840 - RNA, 22 nt, synthetic construct
  source 1..22: mol_type = other RNA
gctgaacctggctaccaggacc

SEQ ID NO: 841 - RNA, 22 nt, synthetic construct
  source 1..22: mol_type = other RNA
gctgagccttgtgccgctgaaa

SEQ ID NO: 842 - RNA, 22 nt, synthetic construct
  source 1..22: mol_type = other RNA
gcttgccttggatttcagcggc

SEQ ID NO: 843 - RNA, 22 nt, synthetic construct
  source 1..22: mol_type = other RNA
gctttatgggagcggtgttcag

SEQ ID NO: 844 - RNA, 22 nt, synthetic construct
  source 1..22: mol_type = other RNA
ggacctggccctgcactctcct

SEQ ID NO: 845 - RNA, 22 nt, synthetic construct
  source 1..22: mol_type = other RNA
ggagagtgcagggccaggtcct

SEQ ID NO: 846 - RNA, 22 nt, synthetic construct
  source 1..22: mol_type = other RNA
ggagcggtgttcaggtcttcag

SEQ ID NO: 847 - RNA, 22 nt, synthetic construct
  source 1..22: mol_type = other RNA
ggatgaagagaagaaaaaacag

SEQ ID NO: 848 - RNA, 22 nt, synthetic construct
  source 1..22: mol_type = other RNA
ggatttcagcggcacaaggctc

SEQ ID NO: 849 - RNA, 22 nt, synthetic construct
  source 1..22: mol_type = other RNA
ggcaagccatggctttatggga

SEQ ID NO: 850 - RNA, 22 nt, synthetic construct
  source 1..22: mol_type = other RNA
ggcacaaggctcagctgaacct

SEQ ID NO: 851 - RNA, 22 nt, synthetic construct
  source 1..22: mol_type = other RNA
ggccaggtcctggtagccaggt

SEQ ID NO: 852 - RNA, 22 nt, synthetic construct
  source 1..22: mol_type = other RNA
ggccctgcactctcctgttttt

SEQ ID NO: 853 - RNA, 22 nt, synthetic construct
  source 1..22: mol_type = other RNA
ggctaccaggacctggccctgc

SEQ ID NO: 854 - RNA, 22 nt, synthetic construct
  source 1..22: mol_type = other RNA
ggctcagctgaacctggctacc

SEQ ID NO: 855 - RNA, 22 nt, synthetic construct
  source 1..22: mol_type = other RNA
ggcttgccttggatttcagcgg

SEQ ID NO: 856 - RNA, 22 nt, synthetic construct
  source 1..22: mol_type = other RNA
ggctttatgggagcggtgttca

SEQ ID NO: 857 - RNA, 22 nt, synthetic construct
  source 1..22: mol_type = other RNA
gggagcggtgttcaggtcttca

SEQ ID NO: 858 - RNA, 22 nt, synthetic construct
  source 1..22: mol_type = other RNA
gggatgaagagaagaaaaaaca

SEQ ID NO: 859 - RNA, 22 nt, synthetic construct
  source 1..22: mol_type = other RNA
gggccaggtcctggtagccagg

SEQ ID NO: 860 - RNA, 22 nt, synthetic construct
  source 1..22: mol_type = other RNA
ggtagccaggttcagctgagcc

SEQ ID NO: 861 - RNA, 22 nt, synthetic construct
  source 1..22: mol_type = other RNA
ggtcctggtagccaggttcagc

SEQ ID NO: 862 - RNA, 22 nt, synthetic construct
  source 1..22: mol_type = other RNA
ggtgagtgagacttttggagca

SEQ ID NO: 863 - RNA, 22 nt, synthetic construct
  source 1..22: mol_type = other RNA
ggttcagctgagccttgtgccg

SEQ ID NO: 864 - RNA, 22 nt, synthetic construct
  source 1..22: mol_type = other RNA
gtagccaggttcagctgagcct

SEQ ID NO: 865 - RNA, 22 nt, synthetic construct
  source 1..22: mol_type = other RNA
gtcctggtagccaggttcagct

SEQ ID NO: 866 - RNA, 22 nt, synthetic construct
  source 1..22: mol_type = other RNA
gtctcactcacctttgcagaag

SEQ ID NO: 867 - RNA, 22 nt, synthetic construct
  source 1..22: mol_type = other RNA
gtcttctgcaaaggtgagtgag

SEQ ID NO: 868 - RNA, 22 nt, synthetic construct
  source 1..22: mol_type = other RNA
gtgagacttttggagcatgaag

SEQ ID NO: 869 - RNA, 22 nt, synthetic construct
  source 1..22: mol_type = other RNA
gtgagtgagacttttggagcat

SEQ ID NO: 870 - RNA, 22 nt, synthetic construct
  source 1..22: mol_type = other RNA
gtgcagggccaggtcctggtag

SEQ ID NO: 871 - RNA, 22 nt, synthetic construct
  source 1..22: mol_type = other RNA
gtgccgctgaaatccaaggcaa

SEQ ID NO: 872 - RNA, 22 nt, synthetic construct
  source 1..22: mol_type = other RNA
gttcagctgagccttgtgccgc

SEQ ID NO: 873 - RNA, 22 nt, synthetic construct
  source 1..22: mol_type = other RNA
gttttttcttctcttcatccct

SEQ ID NO: 874 - RNA, 22 nt, synthetic construct
  source 1..22: mol_type = other RNA
taaagccatggcttgccttgga

SEQ ID NO: 875 - RNA, 22 nt, synthetic construct
  source 1..22: mol_type = other RNA
taccaggacctggccctgcact

SEQ ID NO: 876 - RNA, 22 nt, synthetic construct
  source 1..22: mol_type = other RNA
tacttcctgaagacctgaacac

SEQ ID NO: 877 - RNA, 22 nt, synthetic construct
  source 1..22: mol_type = other RNA
tagccaggttcagctgagcctt

SEQ ID NO: 878 - RNA, 22 nt, synthetic construct
  source 1..22: mol_type = other RNA
tatgggagcggtgttcaggtct

SEQ ID NO: 879 - RNA, 22 nt, synthetic construct
  source 1..22: mol_type = other RNA
tcacctttgcagaagacaggga

SEQ ID NO: 880 - RNA, 22 nt, synthetic construct
  source 1..22: mol_type = other RNA
tcactcacctttgcagaagaca

SEQ ID NO: 881 - RNA, 22 nt, synthetic construct
  source 1..22: mol_type = other RNA
tcagcggcacaaggctcagctg

SEQ ID NO: 882 - RNA, 22 nt, synthetic construct
  source 1..22: mol_type = other RNA
tcagctgaacctggctaccagg

SEQ ID NO: 883 - RNA, 22 nt, synthetic construct
  source 1..22: mol_type = other RNA
tcagctgagccttgtgccgctg

SEQ ID NO: 884 - RNA, 22 nt, synthetic construct
  source 1..22: mol_type = other RNA
tcatccctgtcttctgcaaagg

SEQ ID NO: 885 - RNA, 22 nt, synthetic construct
  source 1..22: mol_type = other RNA
tcatgctccaaaagtctcactc

SEQ ID NO: 886 - RNA, 22 nt, synthetic construct
  source 1..22: mol_type = other RNA
tccaaaagtctcactcaccttt

SEQ ID NO: 887 - RNA, 22 nt, synthetic construct
  source 1..22: mol_type = other RNA
tccaaggcaagccatggcttta

SEQ ID NO: 888 - RNA, 22 nt, synthetic construct
  source 1..22: mol_type = other RNA
tccatcttcatgctccaaaagt

SEQ ID NO: 889 - RNA, 22 nt, synthetic construct
  source 1..22: mol_type = other RNA
tcccataaagccatggcttgcc

SEQ ID NO: 890 - RNA, 22 nt, synthetic construct
  source 1..22: mol_type = other RNA
tccctgtcttctgcaaaggtga

SEQ ID NO: 891 - RNA, 22 nt, synthetic construct
  source 1..22: mol_type = other RNA
tcctccatcttcatgctccaaa

SEQ ID NO: 892 - RNA, 22 nt, synthetic construct
  source 1..22: mol_type = other RNA
tcctgaagacctgaacaccgct

SEQ ID NO: 893 - RNA, 22 nt, synthetic construct
  source 1..22: mol_type = other RNA
tcctggtagccaggttcagctg

SEQ ID NO: 894 - RNA, 22 nt, synthetic construct
  source 1..22: mol_type = other RNA
tcctgttttttcttctcttcat

SEQ ID NO: 895 - RNA, 22 nt, synthetic construct
  source 1..22: mol_type = other RNA
tctacttcctgaagacctgaac

SEQ ID NO: 896 - RNA, 22 nt, synthetic construct
  source 1..22: mol_type = other RNA
tctcactcacctttgcagaaga

SEQ ID NO: 897 - RNA, 22 nt, synthetic construct
  source 1..22: mol_type = other RNA
tctcctgttttttcttctcttc

SEQ ID NO: 898 - RNA, 22 nt, synthetic construct
  source 1..22: mol_type = other RNA
tctcttcatccctgtcttctgc

SEQ ID NO: 899 - RNA, 22 nt, synthetic construct
  source 1..22: mol_type = other RNA
tctgcaaaggtgagtgagactt

SEQ ID NO: 900 - RNA, 22 nt, synthetic construct
  source 1..22: mol_type = other RNA
tcttcatccctgtcttctgcaa

SEQ ID NO: 901 - RNA, 22 nt, synthetic construct
  source 1..22: mol_type = other RNA
tcttcatgctccaaaagtctca

SEQ ID NO: 902 - RNA, 22 nt, synthetic construct
  source 1..22: mol_type = other RNA
tcttctcttcatccctgtcttc

SEQ ID NO: 903 - RNA, 22 nt, synthetic construct
  source 1..22: mol_type = other RNA
tcttctgcaaaggtgagtgaga

SEQ ID NO: 904 - RNA, 22 nt, synthetic construct
  source 1..22: mol_type = other RNA
tgaaatccaaggcaagccatgg

SEQ ID NO: 905 - RNA, 22 nt, synthetic construct
  source 1..22: mol_type = other RNA
tgaacaccgctcccataaagcc

SEQ ID NO: 906 - RNA, 22 nt, synthetic construct
  source 1..22: mol_type = other RNA
tgaacctggctaccaggacctg

SEQ ID NO: 907 - RNA, 22 nt, synthetic construct
  source 1..22: mol_type = other RNA
tgaagacctgaacaccgctccc

SEQ ID NO: 908 - RNA, 22 nt, synthetic construct
  source 1..22: mol_type = other RNA
tgaagagaagaaaaaacaggag

SEQ ID NO: 909 - RNA, 22 nt, synthetic construct
  source 1..22: mol_type = other RNA
tgagacttttggagcatgaaga

SEQ ID NO: 910 - RNA, 22 nt, synthetic construct
  source 1..22: mol_type = other RNA
tgagccttgtgccgctgaaatc

SEQ ID NO: 911 - RNA, 22 nt, synthetic construct
  source 1..22: mol_type = other RNA
tgagtgagacttttggagcatg

SEQ ID NO: 912 - RNA, 22 nt, synthetic construct
  source 1..22: mol_type = other RNA
tgcaaaggtgagtgagactttt

SEQ ID NO: 913 - RNA, 22 nt, synthetic construct
  source 1..22: mol_type = other RNA
tgcactctcctgttttttcttc

SEQ ID NO: 914 - RNA, 22 nt, synthetic construct
  source 1..22: mol_type = other RNA
tgcagaagacagggatgaagag

SEQ ID NO: 915 - RNA, 22 nt, synthetic construct
  source 1..22: mol_type = other RNA
tgcagggccaggtcctggtagc

SEQ ID NO: 916 - RNA, 22 nt, synthetic construct
  source 1..22: mol_type = other RNA
tgccgctgaaatccaaggcaag

SEQ ID NO: 917 - RNA, 22 nt, synthetic construct
  source 1..22: mol_type = other RNA
tgccttggatttcagcggcaca

SEQ ID NO: 918 - RNA, 22 nt, synthetic construct
  source 1..22: mol_type = other RNA
tgctccaaaagtctcactcacc

SEQ ID NO: 919 - RNA, 22 nt, synthetic construct
  source 1..22: mol_type = other RNA
tggatttcagcggcacaaggct

SEQ ID NO: 920 - RNA, 22 nt, synthetic construct
  source 1..22: mol_type = other RNA
tggccctgcactctcctgtttt

SEQ ID NO: 921 - RNA, 22 nt, synthetic construct
  source 1..22: mol_type = other RNA
tggctaccaggacctggccctg

SEQ ID NO: 922 - RNA, 22 nt, synthetic construct
  source 1..22: mol_type = other RNA
tggcttgccttggatttcagcg

SEQ ID NO: 923 - RNA, 22 nt, synthetic construct
  source 1..22: mol_type = other RNA
tggctttatgggagcggtgttc

SEQ ID NO: 924 - RNA, 22 nt, synthetic construct
  source 1..22: mol_type = other RNA
tgggagcggtgttcaggtcttc

SEQ ID NO: 925 - RNA, 22 nt, synthetic construct
  source 1..22: mol_type = other RNA
tggtagccaggttcagctgagc

SEQ ID NO: 926 - RNA, 22 nt, synthetic construct
  source 1..22: mol_type = other RNA
tgtcttctgcaaaggtgagtga

SEQ ID NO: 927 - RNA, 22 nt, synthetic construct
  source 1..22: mol_type = other RNA
tgtgccgctgaaatccaaggca

SEQ ID NO: 928 - RNA, 22 nt, synthetic construct
  source 1..22: mol_type = other RNA
tgttttttcttctcttcatccc

SEQ ID NO: 929 - RNA, 22 nt, synthetic construct
  source 1..22: mol_type = other RNA
ttatgggagcggtgttcaggtc

SEQ ID NO: 930 - RNA, 22 nt, synthetic construct
  source 1..22: mol_type = other RNA
ttcagcggcacaaggctcagct

SEQ ID NO: 931 - RNA, 22 nt, synthetic construct
  source 1..22: mol_type = other RNA
ttcagctgagccttgtgccgct

SEQ ID NO: 932 - RNA, 22 nt, synthetic construct
  source 1..22: mol_type = other RNA
ttcatccctgtcttctgcaaag

SEQ ID NO: 933 - RNA, 22 nt, synthetic construct
  source 1..22: mol_type = other RNA
ttcatgctccaaaagtctcact

SEQ ID NO: 934 - RNA, 22 nt, synthetic construct
  source 1..22: mol_type = other RNA
ttcctgaagacctgaacaccgc

SEQ ID NO: 935 - RNA, 22 nt, synthetic construct
  source 1..22: mol_type = other RNA
ttctcttcatccctgtcttctg

SEQ ID NO: 936 - RNA, 22 nt, synthetic construct
  source 1..22: mol_type = other RNA
ttctgcaaaggtgagtgagact

SEQ ID NO: 937 - RNA, 22 nt, synthetic construct
  source 1..22: mol_type = other RNA
ttcttctcttcatccctgtctt

SEQ ID NO: 938 - RNA, 22 nt, synthetic construct
  source 1..22: mol_type = other RNA
ttgcagaagacagggatgaaga

SEQ ID NO: 939 - RNA, 22 nt, synthetic construct
  source 1..22: mol_type = other RNA
ttgccttggatttcagcggcac

SEQ ID NO: 940 - RNA, 22 nt, synthetic construct
  source 1..22: mol_type = other RNA
ttggatttcagcggcacaaggc

SEQ ID NO: 941 - RNA, 22 nt, synthetic construct
  source 1..22: mol_type = other RNA
ttgtgccgctgaaatccaaggc

SEQ ID NO: 942 - RNA, 22 nt, synthetic construct
  source 1..22: mol_type = other RNA
tttatgggagcggtgttcaggt

SEQ ID NO: 943 - RNA, 22 nt, synthetic construct
  source 1..22: mol_type = other RNA
tttcagcggcacaaggctcagc

SEQ ID NO: 944 - RNA, 22 nt, synthetic construct
  source 1..22: mol_type = other RNA
tttcttctcttcatccctgtct

SEQ ID NO: 945 - RNA, 22 nt, synthetic construct
  source 1..22: mol_type = other RNA
tttgcagaagacagggatgaag

SEQ ID NO: 946 - RNA, 22 nt, synthetic construct
  source 1..22: mol_type = other RNA
ttttcttctcttcatccctgtc

SEQ ID NO: 947 - RNA, 22 nt, synthetic construct
  source 1..22: mol_type = other RNA
tttttcttctcttcatccctgt

SEQ ID NO: 948 - RNA, 22 nt, synthetic construct
  source 1..22: mol_type = other RNA
ttttttcttctcttcatccctg

SEQ ID NO: 949 - RNA, 20 nt, synthetic construct
  source 1..20: mol_type = other RNA
aaaagccaaagggaactcag

SEQ ID NO: 950 - RNA, 20 nt, synthetic construct
  source 1..20: mol_type = other RNA
aaagccaaagggaactcagt

SEQ ID NO: 951 - RNA, 20 nt, synthetic construct
  source 1..20: mol_type = other RNA
aaagccactgaggtccgggt

SEQ ID NO: 952 - RNA, 20 nt, synthetic construct
  source 1..20: mol_type = other RNA
aaagccatttcactgagttg

SEQ ID NO: 953 - RNA, 20 nt, synthetic construct
  source 1..20: mol_type = other RNA
aaagctggcgatgcctcggc

SEQ ID NO: 954 - RNA, 20 nt, synthetic construct
  source 1..20: mol_type = other RNA
aaatcaagtgaacctcacta

SEQ ID NO: 955 - RNA, 20 nt, synthetic construct
  source 1..20: mol_type = other RNA
aaatctgggttccgttgcct

SEQ ID NO: 956 - RNA, 20 nt, synthetic construct
  source 1..20: mol_type = other RNA
aaatggctttgctcaccaat

SEQ ID NO: 957 - RNA, 20 nt, synthetic construct
  source 1..20: mol_type = other RNA
aacaggtgtcaactcagtga

SEQ ID NO: 958 - RNA, 20 nt, synthetic construct
  source 1..20: mol_type = other RNA
aacccagatttatgtaattg

SEQ ID NO: 959 - RNA, 20 nt, synthetic construct
  source 1..20: mol_type = other RNA
aacctacatgatggggaatg

SEQ ID NO: 960 - RNA, 20 nt, synthetic construct
  source 1..20: mol_type = other RNA
aacctcactatccaaggact

SEQ ID NO: 961 - RNA, 20 nt, synthetic construct
  source 1..20: mol_type = other RNA
aacggaacccagatttatgt

SEQ ID NO: 962 - RNA, 20 nt, synthetic construct
  source 1..20: mol_type = other RNA
aactcagtgaaatggctttg

SEQ ID NO: 963 - RNA, 20 nt, synthetic construct
  source 1..20: mol_type = other RNA
aactcattccccatcatgta

SEQ ID NO: 964 - RNA, 20 nt, synthetic construct
  source 1..20: mol_type = other RNA
aagcactgtcacccggacct

SEQ ID NO: 965 - RNA, 20 nt, synthetic construct
  source 1..20: mol_type = other RNA
aagccaaagggaactcagtg

SEQ ID NO: 966 - RNA, 20 nt, synthetic construct
  source 1..20: mol_type = other RNA
aagccactgaggtccgggtg

SEQ ID NO: 967 - RNA, 20 nt, synthetic construct
  source 1..20: mol_type = other RNA
aagccatttcactgagttga

SEQ ID NO: 968 - RNA, 20 nt, synthetic construct
  source 1..20: mol_type = other RNA
aagctggcgatgcctcggct

SEQ ID NO: 969 - RNA, 20 nt, synthetic construct
  source 1..20: mol_type = other RNA
aaggactgagggccatggac

SEQ ID NO: 970 - RNA, 20 nt, synthetic construct
  source 1..20: mol_type = other RNA
aaggtcaactcattccccat

SEQ ID NO: 971 - RNA, 20 nt, synthetic construct
  source 1..20: mol_type = other RNA
aaggtggagctcatgtaccc

SEQ ID NO: 972 - RNA, 20 nt, synthetic construct
  source 1..20: mol_type = other RNA
aagtctgtgcggcaacctac

SEQ ID NO: 973 - RNA, 20 nt, synthetic construct
  source 1..20: mol_type = other RNA
aagtgaacctcactatccaa

SEQ ID NO: 974 - RNA, 20 nt, synthetic construct
  source 1..20: mol_type = other RNA
aatcaagtgaacctcactat

SEQ ID NO: 975 - RNA, 20 nt, synthetic construct
  source 1..20: mol_type = other RNA
aatcatctaggaaggtcaac

SEQ ID NO: 976 - RNA, 20 nt, synthetic construct
  source 1..20: mol_type = other RNA
aatctgggttccgttgccta

SEQ ID NO: 977 - RNA, 20 nt, synthetic construct
  source 1..20: mol_type = other RNA
aatgagttgaccttcctaga

SEQ ID NO: 978 - RNA, 20 nt, synthetic construct
  source 1..20: mol_type = other RNA
aatgcacgtggcccagcctg

SEQ ID NO: 979 - RNA, 20 nt, synthetic construct
  source 1..20: mol_type = other RNA
aatggctttgctcaccaatt

SEQ ID NO: 980 - RNA, 20 nt, synthetic construct
  source 1..20: mol_type = other RNA
aattacataaatctgggttc

SEQ ID NO: 981 - RNA, 20 nt, synthetic construct
  source 1..20: mol_type = other RNA
aattggtgagcaaagccatt

SEQ ID NO: 982 - RNA, 20 nt, synthetic construct
  source 1..20: mol_type = other RNA
acaaagctggcgatgcctcg

SEQ ID NO: 983 - RNA, 20 nt, synthetic construct
  source 1..20: mol_type = other RNA
acacaaagctggcgatgcct

SEQ ID NO: 984 - RNA, 20 nt, synthetic construct
  source 1..20: mol_type = other RNA
acacacaaagctggcgatgc

SEQ ID NO: 985 - RNA, 20 nt, synthetic construct
  source 1..20: mol_type = other RNA
acacgggactctacatctgc

SEQ ID NO: 986 - RNA, 20 nt, synthetic construct
  source 1..20: mol_type = other RNA
acagacttcagtcacctggc

SEQ ID NO: 987 - RNA, 20 nt, synthetic construct
  source 1..20: mol_type = other RNA
acagcaggctgggccacgtg

SEQ ID NO: 988 - RNA, 20 nt, synthetic construct
  source 1..20: mol_type = other RNA
acagccaggtgactgaagtc

SEQ ID NO: 989 - RNA, 20 nt, synthetic construct
  source 1..20: mol_type = other RNA
acaggtgtcaactcagtgaa

SEQ ID NO: 990 - RNA, 20 nt, synthetic construct
  source 1..20: mol_type = other RNA
acagtgcttcggcaggctga

SEQ ID NO: 991 - RNA, 20 nt, synthetic construct
  source 1..20: mol_type = other RNA
acataaatctgggttccgtt

SEQ ID NO: 992 - RNA, 20 nt, synthetic construct
  source 1..20: mol_type = other RNA
acatctgcaaggtggagctc

SEQ ID NO: 993 - RNA, 20 nt, synthetic construct
  source 1..20: mol_type = other RNA
acatgagctccaccttgcag

SEQ ID NO: 994 - RNA, 20 nt, synthetic construct
  source 1..20: mol_type = other RNA
acatgatggggaatgagttg

SEQ ID NO: 995 - RNA, 20 nt, synthetic construct
  source 1..20: mol_type = other RNA
accaattacataaatctggg

SEQ ID NO: 996 - RNA, 20 nt, synthetic construct
  source 1..20: mol_type = other RNA
accacagcaggctgggccac

SEQ ID NO: 997 - RNA, 20 nt, synthetic construct
  source 1..20: mol_type = other RNA
acccaccgccatactacctg

SEQ ID NO: 998 - RNA, 20 nt, synthetic construct
  source 1..20: mol_type = other RNA
acccagatttatgtaattgg

SEQ ID NO: 999 - RNA, 20 nt, synthetic construct
  source 1..20: mol_type = other RNA
acccggacctcagtggcttt

SEQ ID NO: 1000 - RNA, 20 nt, synthetic construct
  source 1..20: mol_type = other RNA
accgccatactacctgggca

SEQ ID NO: 1001 - RNA, 20 nt, synthetic construct
  source 1..20: mol_type = other RNA
acctacatgatggggaatga

SEQ ID NO: 1002 - RNA, 20 nt, synthetic construct
  source 1..20: mol_type = other RNA
acctcactatccaaggactg

SEQ ID NO: 1003 - RNA, 20 nt, synthetic construct
  source 1..20: mol_type = other RNA
acctcagtggctttgcctgg

SEQ ID NO: 1004 - RNA, 20 nt, synthetic construct
  source 1..20: mol_type = other RNA
acctccagtggaaatcaagt

SEQ ID NO: 1005 - RNA, 20 nt, synthetic construct
  source 1..20: mol_type = other RNA
acctggctgtcagcctgccg

SEQ ID NO: 1006 - RNA, 20 nt, synthetic construct
  source 1..20: mol_type = other RNA
acctgggcataggcaacgga

SEQ ID NO: 1007 - RNA, 20 nt, synthetic construct
  source 1..20: mol_type = other RNA
accttcctagatgattccat

SEQ ID NO: 1008 - RNA, 20 nt, synthetic construct
  source 1..20: mol_type = other RNA
accttgcagatgtagagtcc

SEQ ID NO: 1009 - RNA, 20 nt, synthetic construct
  source 1..20: mol_type = other RNA
acggaacccagatttatgta

SEQ ID NO: 1010 - RNA, 20 nt, synthetic construct
  source 1..20: mol_type = other RNA
acgggactctacatctgcaa

SEQ ID NO: 1011 - RNA, 20 nt, synthetic construct
  source 1..20: mol_type = other RNA
acgggcacctccagtggaaa

SEQ ID NO: 1012 - RNA, 20 nt, synthetic construct
  source 1..20: mol_type = other RNA
acgtgcattgctagcatgga

SEQ ID NO: 1013 - RNA, 20 nt, synthetic construct
  source 1..20: mol_type = other RNA
acgtggcccagcctgctgtg

SEQ ID NO: 1014 - RNA, 20 nt, synthetic construct
  source 1..20: mol_type = other RNA
actacctgggcataggcaac

SEQ ID NO: 1015 - RNA, 20 nt, synthetic construct
  source 1..20: mol_type = other RNA
actatccaaggactgagggc

SEQ ID NO: 1016 - RNA, 20 nt, synthetic construct
  source 1..20: mol_type = other RNA
actcacacacaaagctggcg

SEQ ID NO: 1017 - RNA, 20 nt, synthetic construct
  source 1..20: mol_type = other RNA
actcagtgaaatggctttgc

SEQ ID NO: 1018 - RNA, 20 nt, synthetic construct
  source 1..20: mol_type = other RNA
actcattccccatcatgtag

SEQ ID NO: 1019 - RNA, 20 nt, synthetic construct
  source 1..20: mol_type = other RNA
actctacatctgcaaggtgg

SEQ ID NO: 1020 - RNA, 20 nt, synthetic construct
  source 1..20: mol_type = other RNA
actgaagtctgtgcggcaac

SEQ ID NO: 1021 - RNA, 20 nt, synthetic construct
  source 1..20: mol_type = other RNA
actgagggccatggacacgg

SEQ ID NO: 1022 - RNA, 20 nt, synthetic construct
  source 1..20: mol_type = other RNA
actgaggtccgggtgacagt

SEQ ID NO: 1023 - RNA, 20 nt, synthetic construct
  source 1..20: mol_type = other RNA
actgagttccctttggcttt

SEQ ID NO: 1024 - RNA, 20 nt, synthetic construct
  source 1..20: mol_type = other RNA
actggaggtgcccgtgcaga

SEQ ID NO: 1025 - RNA, 20 nt, synthetic construct
  source 1..20: mol_type = other RNA
actggccagcagccgaggca

SEQ ID NO: 1026 - RNA, 20 nt, synthetic construct
  source 1..20: mol_type = other RNA
actgtcacccggacctcagt

SEQ ID NO: 1027 - RNA, 20 nt, synthetic construct
  source 1..20: mol_type = other RNA
acttcagtcacctggctgtc

SEQ ID NO: 1028 - RNA, 20 nt, synthetic construct
  source 1..20: mol_type = other RNA
acttgatttccactggaggt

SEQ ID NO: 1029 - RNA, 20 nt, synthetic construct
  source 1..20: mol_type = other RNA
agacttcagtcacctggctg

SEQ ID NO: 1030 - RNA, 20 nt, synthetic construct
  source 1..20: mol_type = other RNA
agagtcccgtgtccatggcc

SEQ ID NO: 1031 - RNA, 20 nt, synthetic construct
  source 1..20: mol_type = other RNA
agatgattccatctgcacgg

SEQ ID NO: 1032 - RNA, 20 nt, synthetic construct
  source 1..20: mol_type = other RNA
agatgcatactcacacacaa

SEQ ID NO: 1033 - RNA, 20 nt, synthetic construct
  source 1..20: mol_type = other RNA
agatggaatcatctaggaag

SEQ ID NO: 1034 - RNA, 20 nt, synthetic construct
  source 1..20: mol_type = other RNA
agatgtagagtcccgtgtcc

SEQ ID NO: 1035 - RNA, 20 nt, synthetic construct
  source 1..20: mol_type = other RNA
agatttatgtaattggtgag

SEQ ID NO: 1036 - RNA, 20 nt, synthetic construct
  source 1..20: mol_type = other RNA
agcaaagccatttcactgag

SEQ ID NO: 1037 - RNA, 20 nt, synthetic construct
  source 1..20: mol_type = other RNA
agcaatgcacgtggcccagc

SEQ ID NO: 1038 - RNA, 20 nt, synthetic construct
  source 1..20: mol_type = other RNA
agcactgtcacccggacctc

SEQ ID NO: 1039 - RNA, 20 nt, synthetic construct
  source 1..20: mol_type = other RNA
agcagccgaggcatcgccag

SEQ ID NO: 1040 - RNA, 20 nt, synthetic construct
  source 1..20: mol_type = other RNA
agcaggctgggccacgtgca

SEQ ID NO: 1041 - RNA, 20 nt, synthetic construct
  source 1..20: mol_type = other RNA
agcatggaaaagccaaaggg

SEQ ID NO: 1042 - RNA, 20 nt, synthetic construct
  source 1..20: mol_type = other RNA
agccactgaggtccgggtga

SEQ ID NO: 1043 - RNA, 20 nt, synthetic construct
  source 1..20: mol_type = other RNA
agccaggtgactgaagtctg

SEQ ID NO: 1044 - RNA, 20 nt, synthetic construct
  source 1..20: mol_type = other RNA
agccatttcactgagttgac

SEQ ID NO: 1045 - RNA, 20 nt, synthetic construct
  source 1..20: mol_type = other RNA
agccgaggcatcgccagctt

SEQ ID NO: 1046 - RNA, 20 nt, synthetic construct
  source 1..20: mol_type = other RNA
agcctgccgaagcactgtca

SEQ ID NO: 1047 - RNA, 20 nt, synthetic construct
  source 1..20: mol_type = other RNA
agcctgctgtggtactggcc

SEQ ID NO: 1048 - RNA, 20 nt, synthetic construct
  source 1..20: mol_type = other RNA
agctcatgtacccaccgcca

SEQ ID NO: 1049 - RNA, 20 nt, synthetic construct
  source 1..20: mol_type = other RNA
agctccaccttgcagatgta

SEQ ID NO: 1050 - RNA, 20 nt, synthetic construct
  source 1..20: mol_type = other RNA
agctggcgatgcctcggctg

SEQ ID NO: 1051 - RNA, 20 nt, synthetic construct
  source 1..20: mol_type = other RNA
agctttgtgtgtgagtatgc

SEQ ID NO: 1052 - RNA, 20 nt, synthetic construct
  source 1..20: mol_type = other RNA
aggaaggtcaactcattccc

SEQ ID NO: 1053 - RNA, 20 nt, synthetic construct
  source 1..20: mol_type = other RNA
aggactgagggccatggaca

SEQ ID NO: 1054 - RNA, 20 nt, synthetic construct
  source 1..20: mol_type = other RNA
aggcaaagccactgaggtcc

SEQ ID NO: 1055 - RNA, 20 nt, synthetic construct
  source 1..20: mol_type = other RNA
aggcaacggaacccagattt

SEQ ID NO: 1056 - RNA, 20 nt, synthetic construct
  source 1..20: mol_type = other RNA
aggcatcgccagctttgtgt

SEQ ID NO: 1057 - RNA, 20 nt, synthetic construct
  source 1..20: mol_type = other RNA
aggctgacagccaggtgact

SEQ ID NO: 1058 - RNA, 20 nt, synthetic construct
  source 1..20: mol_type = other RNA
aggctgggccacgtgcattg

SEQ ID NO: 1059 - RNA, 20 nt, synthetic construct
  source 1..20: mol_type = other RNA
agggccatggacacgggact

SEQ ID NO: 1060 - RNA, 20 nt, synthetic construct
  source 1..20: mol_type = other RNA
aggtagtatggcggtgggta

SEQ ID NO: 1061 - RNA, 20 nt, synthetic construct
  source 1..20: mol_type = other RNA
aggtcaactcattccccatc

SEQ ID NO: 1062 - RNA, 20 nt, synthetic construct
  source 1..20: mol_type = other RNA
aggtccgggtgacagtgctt

SEQ ID NO: 1063 - RNA, 20 nt, synthetic construct
  source 1..20: mol_type = other RNA
aggtgactgaagtctgtgcg

SEQ ID NO: 1064 - RNA, 20 nt, synthetic construct
  source 1..20: mol_type = other RNA
aggtgcccgtgcagatggaa

SEQ ID NO: 1065 - RNA, 20 nt, synthetic construct
  source 1..20: mol_type = other RNA
aggtggagctcatgtaccca

SEQ ID NO: 1066 - RNA, 20 nt, synthetic construct
  source 1..20: mol_type = other RNA
aggtgtcaactcagtgaaat

SEQ ID NO: 1067 - RNA, 20 nt, synthetic construct
  source 1..20: mol_type = other RNA
aggttcacttgatttccact

SEQ ID NO: 1068 - RNA, 20 nt, synthetic construct
  source 1..20: mol_type = other RNA
aggttgccgcacagacttca

SEQ ID NO: 1069 - RNA, 20 nt, synthetic construct
  source 1..20: mol_type = other RNA
agtaccacagcaggctgggc

SEQ ID NO: 1070 - RNA, 20 nt, synthetic construct
  source 1..20: mol_type = other RNA
agtatgcatctccaggcaaa

SEQ ID NO: 1071 - RNA, 20 nt, synthetic construct
  source 1..20: mol_type = other RNA
agtatggcggtgggtacatg

SEQ ID NO: 1072 - RNA, 20 nt, synthetic construct
  source 1..20: mol_type = other RNA
agtcacctggctgtcagcct

SEQ ID NO: 1073 - RNA, 20 nt, synthetic construct
  source 1..20: mol_type = other RNA
agtcccgtgtccatggccct

SEQ ID NO: 1074 - RNA, 20 nt, synthetic construct
  source 1..20: mol_type = other RNA
agtccttggatagtgaggtt

SEQ ID NO: 1075 - RNA, 20 nt, synthetic construct
  source 1..20: mol_type = other RNA
agtctgtgcggcaacctaca

SEQ ID NO: 1076 - RNA, 20 nt, synthetic construct
  source 1..20: mol_type = other RNA
agtgaaatggctttgctcac

SEQ ID NO: 1077 - RNA, 20 nt, synthetic construct
  source 1..20: mol_type = other RNA
agtgaacctcactatccaag

SEQ ID NO: 1078 - RNA, 20 nt, synthetic construct
  source 1..20: mol_type = other RNA
agtgaggttcacttgatttc

SEQ ID NO: 1079 - RNA, 20 nt, synthetic construct
  source 1..20: mol_type = other RNA
agtgcttcggcaggctgaca

SEQ ID NO: 1080 - RNA, 20 nt, synthetic construct
  source 1..20: mol_type = other RNA
agtggaaatcaagtgaacct

SEQ ID NO: 1081 - RNA, 20 nt, synthetic construct
  source 1..20: mol_type = other RNA
agtggctttgcctggagatg

SEQ ID NO: 1082 - RNA, 20 nt, synthetic construct
  source 1..20: mol_type = other RNA
agttcactgagttccctttg

SEQ ID NO: 1083 - RNA, 20 nt, synthetic construct
  source 1..20: mol_type = other RNA
agttccctttggcttttcca

SEQ ID NO: 1084 - RNA, 20 nt, synthetic construct
  source 1..20: mol_type = other RNA
agttgaccttcctagatgat

SEQ ID NO: 1085 - RNA, 20 nt, synthetic construct
  source 1..20: mol_type = other RNA
ataaatctgggttccgttgc

SEQ ID NO: 1086 - RNA, 20 nt, synthetic construct
  source 1..20: mol_type = other RNA
atactacctgggcataggca

SEQ ID NO: 1087 - RNA, 20 nt, synthetic construct
  source 1..20: mol_type = other RNA
atactcacacacaaagctgg

SEQ ID NO: 1088 - RNA, 20 nt, synthetic construct
  source 1..20: mol_type = other RNA
ataggcaacggaacccagat

SEQ ID NO: 1089 - RNA, 20 nt, synthetic construct
  source 1..20: mol_type = other RNA
atagtgaggttcacttgatt

SEQ ID NO: 1090 - RNA, 20 nt, synthetic construct
  source 1..20: mol_type = other RNA
atcaagtgaacctcactatc

SEQ ID NO: 1091 - RNA, 20 nt, synthetic construct
  source 1..20: mol_type = other RNA
atcatctaggaaggtcaact

SEQ ID NO: 1092 - RNA, 20 nt, synthetic construct
  source 1..20: mol_type = other RNA
atcatgtaggttgccgcaca

SEQ ID NO: 1093 - RNA, 20 nt, synthetic construct
  source 1..20: mol_type = other RNA
atccaaggactgagggccat

SEQ ID NO: 1094 - RNA, 20 nt, synthetic construct
  source 1..20: mol_type = other RNA
atcgccagctttgtgtgtga

SEQ ID NO: 1095 - RNA, 20 nt, synthetic construct
  source 1..20: mol_type = other RNA
atctaggaaggtcaactcat

SEQ ID NO: 1096 - RNA, 20 nt, synthetic construct
  source 1..20: mol_type = other RNA
atctccaggcaaagccactg

SEQ ID NO: 1097 - RNA, 20 nt, synthetic construct
  source 1..20: mol_type = other RNA
atctgcaaggtggagctcat

SEQ ID NO: 1098 - RNA, 20 nt, synthetic construct
  source 1..20: mol_type = other RNA
atctgcacgggcacctccag

SEQ ID NO: 1099 - RNA, 20 nt, synthetic construct
  source 1..20: mol_type = other RNA
atctgggttccgttgcctat

SEQ ID NO: 1100 - RNA, 20 nt, synthetic construct
  source 1..20: mol_type = other RNA
atgagctccaccttgcagat

SEQ ID NO: 1101 - RNA, 20 nt, synthetic construct
  source 1..20: mol_type = other RNA
atgagttcactgagttccct

SEQ ID NO: 1102 - RNA, 20 nt, synthetic construct
  source 1..20: mol_type = other RNA
atgagttgaccttcctagat

SEQ ID NO: 1103 - RNA, 20 nt, synthetic construct
  source 1..20: mol_type = other RNA
atgatggggaatgagttgac

SEQ ID NO: 1104 - RNA, 20 nt, synthetic construct
  source 1..20: mol_type = other RNA
atgattccatctgcacgggc

SEQ ID NO: 1105 - RNA, 20 nt, synthetic construct
  source 1..20: mol_type = other RNA
atgcacgtggcccagcctgc

SEQ ID NO: 1106 - RNA, 20 nt, synthetic construct
  source 1..20: mol_type = other RNA
atgcatactcacacacaaag

SEQ ID NO: 1107 - RNA, 20 nt, synthetic construct
  source 1..20: mol_type = other RNA
atgcatctccaggcaaagcc

SEQ ID NO: 1108 - RNA, 20 nt, synthetic construct
  source 1..20: mol_type = other RNA
atgcccaggtagtatggcgg

SEQ ID NO: 1109 - RNA, 20 nt, synthetic construct
  source 1..20: mol_type = other RNA
atgcctcggctgctggccag

SEQ ID NO: 1110 - RNA, 20 nt, synthetic construct
  source 1..20: mol_type = other RNA
atgctagcaatgcacgtggc

SEQ ID NO: 1111 - RNA, 20 nt, synthetic construct
  source 1..20: mol_type = other RNA
atggaaaagccaaagggaac

SEQ ID NO: 1112 - RNA, 20 nt, synthetic construct
  source 1..20: mol_type = other RNA
atggaatcatctaggaaggt

SEQ ID NO: 1113 - RNA, 20 nt, synthetic construct
  source 1..20: mol_type = other RNA
atggacacgggactctacat

SEQ ID NO: 1114 - RNA, 20 nt, synthetic construct
  source 1..20: mol_type = other RNA
atggccctcagtccttggat

SEQ ID NO: 1115 - RNA, 20 nt, synthetic construct
  source 1..20: mol_type = other RNA
atggcggtgggtacatgagc

SEQ ID NO: 1116 - RNA, 20 nt, synthetic construct
  source 1..20: mol_type = other RNA
atggctttgctcaccaatta

SEQ ID NO: 1117 - RNA, 20 nt, synthetic construct
  source 1..20: mol_type = other RNA
atggggaatgagttgacctt

SEQ ID NO: 1118 - RNA, 20 nt, synthetic construct
  source 1..20: mol_type = other RNA
atgtaattggtgagcaaagc

SEQ ID NO: 1119 - RNA, 20 nt, synthetic construct
  source 1..20: mol_type = other RNA
atgtacccaccgccatacta

SEQ ID NO: 1120 - RNA, 20 nt, synthetic construct
  source 1..20: mol_type = other RNA
atgtagagtcccgtgtccat

SEQ ID NO: 1121 - RNA, 20 nt, synthetic construct
  source 1..20: mol_type = other RNA
atgtaggttgccgcacagac

SEQ ID NO: 1122 - RNA, 20 nt, synthetic construct
  source 1..20: mol_type = other RNA
attacataaatctgggttcc

SEQ ID NO: 1123 - RNA, 20 nt, synthetic construct
  source 1..20: mol_type = other RNA
attccatctgcacgggcacc

SEQ ID NO: 1124 - RNA, 20 nt, synthetic construct
  source 1..20: mol_type = other RNA
attccccatcatgtaggttg

SEQ ID NO: 1125 - RNA, 20 nt, synthetic construct
  source 1..20: mol_type = other RNA
attgctagcatggaaaagcc

SEQ ID NO: 1126 - RNA, 20 nt, synthetic construct
  source 1..20: mol_type = other RNA
attggtgagcaaagccattt

SEQ ID NO: 1127 - RNA, 20 nt, synthetic construct
  source 1..20: mol_type = other RNA
atttatgtaattggtgagca

SEQ ID NO: 1128 - RNA, 20 nt, synthetic construct
  source 1..20: mol_type = other RNA
atttccactggaggtgcccg

SEQ ID NO: 1129 - RNA, 20 nt, synthetic construct
  source 1..20: mol_type = other RNA
caaagccactgaggtccggg

SEQ ID NO: 1130 - RNA, 20 nt, synthetic construct
  source 1..20: mol_type = other RNA
caaagccatttcactgagtt

SEQ ID NO: 1131 - RNA, 20 nt, synthetic construct
  source 1..20: mol_type = other RNA
caaagctggcgatgcctcgg

SEQ ID NO: 1132 - RNA, 20 nt, synthetic construct
  source 1..20: mol_type = other RNA
caacaggtgtcaactcagtg

SEQ ID NO: 1133 - RNA, 20 nt, synthetic construct
  source 1..20: mol_type = other RNA
caacctacatgatggggaat

SEQ ID NO: 1134 - RNA, 20 nt, synthetic construct
  source 1..20: mol_type = other RNA
caacggaacccagatttatg

SEQ ID NO: 1135 - RNA, 20 nt, synthetic construct
  source 1..20: mol_type = other RNA
caactcagtgaaatggcttt

SEQ ID NO: 1136 - RNA, 20 nt, synthetic construct
  source 1..20: mol_type = other RNA
caactcattccccatcatgt

SEQ ID NO: 1137 - RNA, 20 nt, synthetic construct
  source 1..20: mol_type = other RNA
caaggactgagggccatgga

SEQ ID NO: 1138 - RNA, 20 nt, synthetic construct
  source 1..20: mol_type = other RNA
caaggtggagctcatgtacc

SEQ ID NO: 1139 - RNA, 20 nt, synthetic construct
  source 1..20: mol_type = other RNA
caagtgaacctcactatcca

SEQ ID NO: 1140 - RNA, 20 nt, synthetic construct
  source 1..20: mol_type = other RNA
caatgcacgtggcccagcct

SEQ ID NO: 1141 - RNA, 20 nt, synthetic construct
  source 1..20: mol_type = other RNA
caattacataaatctgggtt

SEQ ID NO: 1142 - RNA, 20 nt, synthetic construct
  source 1..20: mol_type = other RNA
cacaaagctggcgatgcctc

SEQ ID NO: 1143 - RNA, 20 nt, synthetic construct
  source 1..20: mol_type = other RNA
cacacaaagctggcgatgcc

SEQ ID NO: 1144 - RNA, 20 nt, synthetic construct
  source 1..20: mol_type = other RNA
cacacacaaagctggcgatg

SEQ ID NO: 1145 - RNA, 20 nt, synthetic construct
  source 1..20: mol_type = other RNA
cacagacttcagtcacctgg

SEQ ID NO: 1146 - RNA, 20 nt, synthetic construct
  source 1..20: mol_type = other RNA
cacagcaggctgggccacgt

SEQ ID NO: 1147 - RNA, 20 nt, synthetic construct
  source 1..20: mol_type = other RNA
caccaattacataaatctgg

SEQ ID NO: 1148 - RNA, 20 nt, synthetic construct
  source 1..20: mol_type = other RNA
cacccggacctcagtggctt

SEQ ID NO: 1149 - RNA, 20 nt, synthetic construct
  source 1..20: mol_type = other RNA
caccgccatactacctgggc

SEQ ID NO: 1150 - RNA, 20 nt, synthetic construct
  source 1..20: mol_type = other RNA
cacctccagtggaaatcaag

SEQ ID NO: 1151 - RNA, 20 nt, synthetic construct
  source 1..20: mol_type = other RNA
cacctggctgtcagcctgcc

SEQ ID NO: 1152 - RNA, 20 nt, synthetic construct
  source 1..20: mol_type = other RNA
caccttgcagatgtagagtc

SEQ ID NO: 1153 - RNA, 20 nt, synthetic construct
  source 1..20: mol_type = other RNA
cacgggactctacatctgca

SEQ ID NO: 1154 - RNA, 20 nt, synthetic construct
  source 1..20: mol_type = other RNA
cacgggcacctccagtggaa

SEQ ID NO: 1155 - RNA, 20 nt, synthetic construct
  source 1..20: mol_type = other RNA
cacgtgcattgctagcatgg

SEQ ID NO: 1156 - RNA, 20 nt, synthetic construct
  source 1..20: mol_type = other RNA
cacgtggcccagcctgctgt

SEQ ID NO: 1157 - RNA, 20 nt, synthetic construct
  source 1..20: mol_type = other RNA
cactatccaaggactgaggg

SEQ ID NO: 1158 - RNA, 20 nt, synthetic construct
  source 1..20: mol_type = other RNA
cactgaggtccgggtgacag

SEQ ID NO: 1159 - RNA, 20 nt, synthetic construct
  source 1..20: mol_type = other RNA
cactgagttccctttggctt

SEQ ID NO: 1160 - RNA, 20 nt, synthetic construct
  source 1..20: mol_type = other RNA
cactggaggtgcccgtgcag

SEQ ID NO: 1161 - RNA, 20 nt, synthetic construct
  source 1..20: mol_type = other RNA
cactgtcacccggacctcag

SEQ ID NO: 1162 - RNA, 20 nt, synthetic construct
  source 1..20: mol_type = other RNA
cacttgatttccactggagg

SEQ ID NO: 1163 - RNA, 20 nt, synthetic construct
  source 1..20: mol_type = other RNA
cagacttcagtcacctggct

SEQ ID NO: 1164 - RNA, 20 nt, synthetic construct
  source 1..20: mol_type = other RNA
cagatggaatcatctaggaa

SEQ ID NO: 1165 - RNA, 20 nt, synthetic construct
  source 1..20: mol_type = other RNA
cagatgtagagtcccgtgtc

SEQ ID NO: 1166 - RNA, 20 nt, synthetic construct
  source 1..20: mol_type = other RNA
cagatttatgtaattggtga

SEQ ID NO: 1167 - RNA, 20 nt, synthetic construct
  source 1..20: mol_type = other RNA
cagcagccgaggcatcgcca

SEQ ID NO: 1168 - RNA, 20 nt, synthetic construct
  source 1..20: mol_type = other RNA
cagcaggctgggccacgtgc

SEQ ID NO: 1169 - RNA, 20 nt, synthetic construct
  source 1..20: mol_type = other RNA
cagccaggtgactgaagtct

SEQ ID NO: 1170 - RNA, 20 nt, synthetic construct
  source 1..20: mol_type = other RNA
cagccgaggcatcgccagct

SEQ ID NO: 1171 - RNA, 20 nt, synthetic construct
  source 1..20: mol_type = other RNA
cagcctgccgaagcactgtc

SEQ ID NO: 1172 - RNA, 20 nt, synthetic construct
  source 1..20: mol_type = other RNA
cagcctgctgtggtactggc

SEQ ID NO: 1173 - RNA, 20 nt, synthetic construct
  source 1..20: mol_type = other RNA
cagctttgtgtgtgagtatg

SEQ ID NO: 1174 - RNA, 20 nt, synthetic construct
  source 1..20: mol_type = other RNA
caggcaaagccactgaggtc

SEQ ID NO: 1175 - RNA, 20 nt, synthetic construct
  source 1..20: mol_type = other RNA
caggctgacagccaggtgac

SEQ ID NO: 1176 - RNA, 20 nt, synthetic construct
  source 1..20: mol_type = other RNA
caggctgggccacgtgcatt

SEQ ID NO: 1177 - RNA, 20 nt, synthetic construct
  source 1..20: mol_type = other RNA
caggtagtatggcggtgggt

SEQ ID NO: 1178 - RNA, 20 nt, synthetic construct
  source 1..20: mol_type = other RNA
caggtgactgaagtctgtgc

SEQ ID NO: 1179 - RNA, 20 nt, synthetic construct
  source 1..20: mol_type = other RNA
caggtgtcaactcagtgaaa

SEQ ID NO: 1180 - RNA, 20 nt, synthetic construct
  source 1..20: mol_type = other RNA
cagtaccacagcaggctggg

SEQ ID NO: 1181 - RNA, 20 nt, synthetic construct
  source 1..20: mol_type = other RNA
cagtcacctggctgtcagcc

SEQ ID NO: 1182 - RNA, 20 nt, synthetic construct
  source 1..20: mol_type = other RNA
cagtccttggatagtgaggt

SEQ ID NO: 1183 - RNA, 20 nt, synthetic construct
  source 1..20: mol_type = other RNA
cagtgaaatggctttgctca

SEQ ID NO: 1184 - RNA, 20 nt, synthetic construct
  source 1..20: mol_type = other RNA
cagtgcttcggcaggctgac

SEQ ID NO: 1185 - RNA, 20 nt, synthetic construct
  source 1..20: mol_type = other RNA
cagtggaaatcaagtgaacc

SEQ ID NO: 1186 - RNA, 20 nt, synthetic construct
  source 1..20: mol_type = other RNA
cagtggctttgcctggagat

SEQ ID NO: 1187 - RNA, 20 nt, synthetic construct
  source 1..20: mol_type = other RNA
cataaatctgggttccgttg

SEQ ID NO: 1188 - RNA, 20 nt, synthetic construct
  source 1..20: mol_type = other RNA
catactacctgggcataggc

SEQ ID NO: 1189 - RNA, 20 nt, synthetic construct
  source 1..20: mol_type = other RNA
catactcacacacaaagctg

SEQ ID NO: 1190 - RNA, 20 nt, synthetic construct
  source 1..20: mol_type = other RNA
cataggcaacggaacccaga

SEQ ID NO: 1191 - RNA, 20 nt, synthetic construct
  source 1..20: mol_type = other RNA
catcatgtaggttgccgcac

SEQ ID NO: 1192 - RNA, 20 nt, synthetic construct
  source 1..20: mol_type = other RNA
catcgccagctttgtgtgtg

SEQ ID NO: 1193 - RNA, 20 nt, synthetic construct
  source 1..20: mol_type = other RNA
catctaggaaggtcaactca

SEQ ID NO: 1194 - RNA, 20 nt, synthetic construct
  source 1..20: mol_type = other RNA
catctccaggcaaagccact

SEQ ID NO: 1195 - RNA, 20 nt, synthetic construct
  source 1..20: mol_type = other RNA
catctgcaaggtggagctca

SEQ ID NO: 1196 - RNA, 20 nt, synthetic construct
  source 1..20: mol_type = other RNA
catctgcacgggcacctcca

SEQ ID NO: 1197 - RNA, 20 nt, synthetic construct
  source 1..20: mol_type = other RNA
catgagctccaccttgcaga

SEQ ID NO: 1198 - RNA, 20 nt, synthetic construct
  source 1..20: mol_type = other RNA
catgagttcactgagttccc

SEQ ID NO: 1199 - RNA, 20 nt, synthetic construct
  source 1..20: mol_type = other RNA
catgatggggaatgagttga

SEQ ID NO: 1200 - RNA, 20 nt, synthetic construct
  source 1..20: mol_type = other RNA
catgctagcaatgcacgtgg

SEQ ID NO: 1201 - RNA, 20 nt, synthetic construct
  source 1..20: mol_type = other RNA
catggaaaagccaaagggaa

SEQ ID NO: 1202 - RNA, 20 nt, synthetic construct
  source 1..20: mol_type = other RNA
catggacacgggactctaca

SEQ ID NO: 1203 - RNA, 20 nt, synthetic construct
  source 1..20: mol_type = other RNA
catggccctcagtccttgga

SEQ ID NO: 1204 - RNA, 20 nt, synthetic construct
  source 1..20: mol_type = other RNA
catgtacccaccgccatact

SEQ ID NO: 1205 - RNA, 20 nt, synthetic construct
  source 1..20: mol_type = other RNA
catgtaggttgccgcacaga

SEQ ID NO: 1206 - RNA, 20 nt, synthetic construct
  source 1..20: mol_type = other RNA
cattccccatcatgtaggtt

SEQ ID NO: 1207 - RNA, 20 nt, synthetic construct
  source 1..20: mol_type = other RNA
cattgctagcatggaaaagc

SEQ ID NO: 1208 - RNA, 20 nt, synthetic construct
  source 1..20: mol_type = other RNA
ccaaggactgagggccatgg

SEQ ID NO: 1209 - RNA, 20 nt, synthetic construct
  source 1..20: mol_type = other RNA
ccaattacataaatctgggt

SEQ ID NO: 1210 - RNA, 20 nt, synthetic construct
  source 1..20: mol_type = other RNA
ccacagcaggctgggccacg

SEQ ID NO: 1211 - RNA, 20 nt, synthetic construct
  source 1..20: mol_type = other RNA
ccaccgccatactacctggg

SEQ ID NO: 1212 - RNA, 20 nt, synthetic construct
  source 1..20: mol_type = other RNA
ccaccttgcagatgtagagt

SEQ ID NO: 1213 - RNA, 20 nt, synthetic construct
  source 1..20: mol_type = other RNA
ccacgtgcattgctagcatg

SEQ ID NO: 1214 - RNA, 20 nt, synthetic construct
  source 1..20: mol_type = other RNA
ccactgaggtccgggtgaca

SEQ ID NO: 1215 - RNA, 20 nt, synthetic construct
  source 1..20: mol_type = other RNA
ccactggaggtgcccgtgca

SEQ ID NO: 1216 - RNA, 20 nt, synthetic construct
  source 1..20: mol_type = other RNA
ccagatttatgtaattggtg

SEQ ID NO: 1217 - RNA, 20 nt, synthetic construct
  source 1..20: mol_type = other RNA
ccagcagccgaggcatcgcc

SEQ ID NO: 1218 - RNA, 20 nt, synthetic construct
  source 1..20: mol_type = other RNA
ccagcctgctgtggtactgg

SEQ ID NO: 1219 - RNA, 20 nt, synthetic construct
  source 1..20: mol_type = other RNA
ccagctttgtgtgtgagtat

SEQ ID NO: 1220 - RNA, 20 nt, synthetic construct
  source 1..20: mol_type = other RNA
ccaggcaaagccactgaggt

SEQ ID NO: 1221 - RNA, 20 nt, synthetic construct
  source 1..20: mol_type = other RNA
ccaggtagtatggcggtggg

SEQ ID NO: 1222 - RNA, 20 nt, synthetic construct
  source 1..20: mol_type = other RNA
ccaggtgactgaagtctgtg

SEQ ID NO: 1223 - RNA, 20 nt, synthetic construct
  source 1..20: mol_type = other RNA
ccagtaccacagcaggctgg

SEQ ID NO: 1224 - RNA, 20 nt, synthetic construct
  source 1..20: mol_type = other RNA
ccagtggaaatcaagtgaac

SEQ ID NO: 1225 - RNA, 20 nt, synthetic construct
  source 1..20: mol_type = other RNA
ccatactacctgggcatagg

SEQ ID NO: 1226 - RNA, 20 nt, synthetic construct
  source 1..20: mol_type = other RNA
ccatcatgtaggttgccgca

SEQ ID NO: 1227 - RNA, 20 nt, synthetic construct
  source 1..20: mol_type = other RNA
ccatctgcacgggcacctcc

SEQ ID NO: 1228 - RNA, 20 nt, synthetic construct
  source 1..20: mol_type = other RNA
ccatgctagcaatgcacgtg

SEQ ID NO: 1229 - RNA, 20 nt, synthetic construct
  source 1..20: mol_type = other RNA
ccatggacacgggactctac

SEQ ID NO: 1230 - RNA, 20 nt, synthetic construct
  source 1..20: mol_type = other RNA
ccatggccctcagtccttgg

SEQ ID NO: 1231 - RNA, 20 nt, synthetic construct
  source 1..20: mol_type = other RNA
ccatttcactgagttgacac

SEQ ID NO: 1232 - RNA, 20 nt, synthetic construct
  source 1..20: mol_type = other RNA
cccaccgccatactacctgg

SEQ ID NO: 1233 - RNA, 20 nt, synthetic construct
  source 1..20: mol_type = other RNA
cccagatttatgtaattggt

SEQ ID NO: 1234 - RNA, 20 nt, synthetic construct
  source 1..20: mol_type = other RNA
cccagcctgctgtggtactg

SEQ ID NO: 1235 - RNA, 20 nt, synthetic construct
  source 1..20: mol_type = other RNA
cccaggtagtatggcggtgg

SEQ ID NO: 1236 - RNA, 20 nt, synthetic construct
  source 1..20: mol_type = other RNA
cccatcatgtaggttgccgc

SEQ ID NO: 1237 - RNA, 20 nt, synthetic construct
  source 1..20: mol_type = other RNA
ccccatcatgtaggttgccg

SEQ ID NO: 1238 - RNA, 20 nt, synthetic construct
  source 1..20: mol_type = other RNA
cccggacctcagtggctttg

SEQ ID NO: 1239 - RNA, 20 nt, synthetic construct
  source 1..20: mol_type = other RNA
cccgtgcagatggaatcatc

SEQ ID NO: 1240 - RNA, 20 nt, synthetic construct
  source 1..20: mol_type = other RNA
cccgtgtccatggccctcag

SEQ ID NO: 1241 - RNA, 20 nt, synthetic construct
  source 1..20: mol_type = other RNA
ccctcagtccttggatagtg

SEQ ID NO: 1242 - RNA, 20 nt, synthetic construct
  source 1..20: mol_type = other RNA
ccctttggcttttccatgct

SEQ ID NO: 1243 - RNA, 20 nt, synthetic construct
  source 1..20: mol_type = other RNA
ccgaagcactgtcacccgga

SEQ ID NO: 1244 - RNA, 20 nt, synthetic construct
  source 1..20: mol_type = other RNA
ccgaggcatcgccagctttg

SEQ ID NO: 1245 - RNA, 20 nt, synthetic construct
  source 1..20: mol_type = other RNA
ccgcacagacttcagtcacc

SEQ ID NO: 1246 - RNA, 20 nt, synthetic construct
  source 1..20: mol_type = other RNA
ccgccatactacctgggcat

SEQ ID NO: 1247 - RNA, 20 nt, synthetic construct
  source 1..20: mol_type = other RNA
ccggacctcagtggctttgc

SEQ ID NO: 1248 - RNA, 20 nt, synthetic construct
  source 1..20: mol_type = other RNA
ccgggtgacagtgcttcggc

SEQ ID NO: 1249 - RNA, 20 nt, synthetic construct
  source 1..20: mol_type = other RNA
ccgtgcagatggaatcatct

SEQ ID NO: 1250 - RNA, 20 nt, synthetic construct
  source 1..20: mol_type = other RNA
ccgtgtccatggccctcagt

SEQ ID NO: 1251 - RNA, 20 nt, synthetic construct
  source 1..20: mol_type = other RNA
ccgttgcctatgcccaggta

SEQ ID NO: 1252 - RNA, 20 nt, synthetic construct
  source 1..20: mol_type = other RNA
cctacatgatggggaatgag

SEQ ID NO: 1253 - RNA, 20 nt, synthetic construct
  source 1..20: mol_type = other RNA
cctagatgattccatctgca

SEQ ID NO: 1254 - RNA, 20 nt, synthetic construct
  source 1..20: mol_type = other RNA
cctatgcccaggtagtatgg

SEQ ID NO: 1255 - RNA, 20 nt, synthetic construct
  source 1..20: mol_type = other RNA
cctcactatccaaggactga

SEQ ID NO: 1256 - RNA, 20 nt, synthetic construct
  source 1..20: mol_type = other RNA
cctcagtccttggatagtga

SEQ ID NO: 1257 - RNA, 20 nt, synthetic construct
  source 1..20: mol_type = other RNA
cctcagtggctttgcctgga

SEQ ID NO: 1258 - RNA, 20 nt, synthetic construct
  source 1..20: mol_type = other RNA
cctccagtggaaatcaagtg

SEQ ID NO: 1259 - RNA, 20 nt, synthetic construct
  source 1..20: mol_type = other RNA
cctcggctgctggccagtac

SEQ ID NO: 1260 - RNA, 20 nt, synthetic construct
  source 1..20: mol_type = other RNA
cctgccgaagcactgtcacc

SEQ ID NO: 1261 - RNA, 20 nt, synthetic construct
  source 1..20: mol_type = other RNA
cctgctgtggtactggccag

SEQ ID NO: 1262 - RNA, 20 nt, synthetic construct
  source 1..20: mol_type = other RNA
cctggagatgcatactcaca

SEQ ID NO: 1263 - RNA, 20 nt, synthetic construct
  source 1..20: mol_type = other RNA
cctggctgtcagcctgccga

SEQ ID NO: 1264 - RNA, 20 nt, synthetic construct
  source 1..20: mol_type = other RNA
cctgggcataggcaacggaa

SEQ ID NO: 1265 - RNA, 20 nt, synthetic construct
  source 1..20: mol_type = other RNA
ccttcctagatgattccatc

SEQ ID NO: 1266 - RNA, 20 nt, synthetic construct
  source 1..20: mol_type = other RNA
ccttgcagatgtagagtccc

SEQ ID NO: 1267 - RNA, 20 nt, synthetic construct
  source 1..20: mol_type = other RNA
ccttggatagtgaggttcac

SEQ ID NO: 1268 - RNA, 20 nt, synthetic construct
  source 1..20: mol_type = other RNA
cctttggcttttccatgcta

SEQ ID NO: 1269 - RNA, 20 nt, synthetic construct
  source 1..20: mol_type = other RNA
cgaagcactgtcacccggac

SEQ ID NO: 1270 - RNA, 20 nt, synthetic construct
  source 1..20: mol_type = other RNA
cgaggcatcgccagctttgt

SEQ ID NO: 1271 - RNA, 20 nt, synthetic construct
  source 1..20: mol_type = other RNA
cgatgcctcggctgctggcc

SEQ ID NO: 1272 - RNA, 20 nt, synthetic construct
  source 1..20: mol_type = other RNA
cgcacagacttcagtcacct

SEQ ID NO: 1273 - RNA, 20 nt, synthetic construct
  source 1..20: mol_type = other RNA
cgccagctttgtgtgtgagt

SEQ ID NO: 1274 - RNA, 20 nt, synthetic construct
  source 1..20: mol_type = other RNA
cgccatactacctgggcata

SEQ ID NO: 1275 - RNA, 20 nt, synthetic construct
  source 1..20: mol_type = other RNA
cggaacccagatttatgtaa

SEQ ID NO: 1276 - RNA, 20 nt, synthetic construct
  source 1..20: mol_type = other RNA
cggacctcagtggctttgcc

SEQ ID NO: 1277 - RNA, 20 nt, synthetic construct
  source 1..20: mol_type = other RNA
cggcaacctacatgatgggg

SEQ ID NO: 1278 - RNA, 20 nt, synthetic construct
  source 1..20: mol_type = other RNA
cggcaggctgacagccaggt

SEQ ID NO: 1279 - RNA, 20 nt, synthetic construct
  source 1..20: mol_type = other RNA
cggctgctggccagtaccac

SEQ ID NO: 1280 - RNA, 20 nt, synthetic construct
  source 1..20: mol_type = other RNA
cgggactctacatctgcaag

SEQ ID NO: 1281 - RNA, 20 nt, synthetic construct
  source 1..20: mol_type = other RNA
cgggcacctccagtggaaat

SEQ ID NO: 1282 - RNA, 20 nt, synthetic construct
  source 1..20: mol_type = other RNA
cgggtgacagtgcttcggca

SEQ ID NO: 1283 - RNA, 20 nt, synthetic construct
  source 1..20: mol_type = other RNA
cggtgggtacatgagctcca

SEQ ID NO: 1284 - RNA, 20 nt, synthetic construct
  source 1..20: mol_type = other RNA
cgtgcagatggaatcatcta

SEQ ID NO: 1285 - RNA, 20 nt, synthetic construct
  source 1..20: mol_type = other RNA
cgtgcattgctagcatggaa

SEQ ID NO: 1286 - RNA, 20 nt, synthetic construct
  source 1..20: mol_type = other RNA
cgtggcccagcctgctgtgg

SEQ ID NO: 1287 - RNA, 20 nt, synthetic construct
  source 1..20: mol_type = other RNA
cgtgtccatggccctcagtc

SEQ ID NO: 1288 - RNA, 20 nt, synthetic construct
  source 1..20: mol_type = other RNA
cgttgcctatgcccaggtag

SEQ ID NO: 1289 - RNA, 20 nt, synthetic construct
  source 1..20: mol_type = other RNA
ctacatctgcaaggtggagc

SEQ ID NO: 1290 - RNA, 20 nt, synthetic construct
  source 1..20: mol_type = other RNA
ctacatgatggggaatgagt

SEQ ID NO: 1291 - RNA, 20 nt, synthetic construct
  source 1..20: mol_type = other RNA
ctacctgggcataggcaacg

SEQ ID NO: 1292 - RNA, 20 nt, synthetic construct
  source 1..20: mol_type = other RNA
ctagatgattccatctgcac

SEQ ID NO: 1293 - RNA, 20 nt, synthetic construct
  source 1..20: mol_type = other RNA
ctagcaatgcacgtggccca

SEQ ID NO: 1294 - RNA, 20 nt, synthetic construct
  source 1..20: mol_type = other RNA
ctagcatggaaaagccaaag

SEQ ID NO: 1295 - RNA, 20 nt, synthetic construct
  source 1..20: mol_type = other RNA
ctaggaaggtcaactcattc

SEQ ID NO: 1296 - RNA, 20 nt, synthetic construct
  source 1..20: mol_type = other RNA
ctatccaaggactgagggcc

SEQ ID NO: 1297 - RNA, 20 nt, synthetic construct
  source 1..20: mol_type = other RNA
ctatgcccaggtagtatggc

SEQ ID NO: 1298 - RNA, 20 nt, synthetic construct
  source 1..20: mol_type = other RNA
ctcacacacaaagctggcga

SEQ ID NO: 1299 - RNA, 20 nt, synthetic construct
  source 1..20: mol_type = other RNA
ctcaccaattacataaatct

SEQ ID NO: 1300 - RNA, 20 nt, synthetic construct
  source 1..20: mol_type = other RNA
ctcactatccaaggactgag

SEQ ID NO: 1301 - RNA, 20 nt, synthetic construct
  source 1..20: mol_type = other RNA
ctcagtccttggatagtgag

SEQ ID NO: 1302 - RNA, 20 nt, synthetic construct
  source 1..20: mol_type = other RNA
ctcagtgaaatggctttgct

SEQ ID NO: 1303 - RNA, 20 nt, synthetic construct
  source 1..20: mol_type = other RNA
ctcagtggctttgcctggag

SEQ ID NO: 1304 - RNA, 20 nt, synthetic construct
  source 1..20: mol_type = other RNA
ctcatgtacccaccgccata

SEQ ID NO: 1305 - RNA, 20 nt, synthetic construct
  source 1..20: mol_type = other RNA
ctcattccccatcatgtagg

SEQ ID NO: 1306 - RNA, 20 nt, synthetic construct
  source 1..20: mol_type = other RNA
ctccaccttgcagatgtaga

SEQ ID NO: 1307 - RNA, 20 nt, synthetic construct
  source 1..20: mol_type = other RNA
ctccaggcaaagccactgag

SEQ ID NO: 1308 - RNA, 20 nt, synthetic construct
  source 1..20: mol_type = other RNA
ctccagtggaaatcaagtga

SEQ ID NO: 1309 - RNA, 20 nt, synthetic construct
  source 1..20: mol_type = other RNA
ctcggctgctggccagtacc

SEQ ID NO: 1310 - RNA, 20 nt, synthetic construct
  source 1..20: mol_type = other RNA
ctctacatctgcaaggtgga

SEQ ID NO: 1311 - RNA, 20 nt, synthetic construct
  source 1..20: mol_type = other RNA
ctgaagtctgtgcggcaacc

SEQ ID NO: 1312 - RNA, 20 nt, synthetic construct
  source 1..20: mol_type = other RNA
ctgacagccaggtgactgaa

SEQ ID NO: 1313 - RNA, 20 nt, synthetic construct
  source 1..20: mol_type = other RNA
ctgagggccatggacacggg

SEQ ID NO: 1314 - RNA, 20 nt, synthetic construct
  source 1..20: mol_type = other RNA
ctgaggtccgggtgacagtg

SEQ ID NO: 1315 - RNA, 20 nt, synthetic construct
  source 1..20: mol_type = other RNA
ctgagttccctttggctttt

SEQ ID NO: 1316 - RNA, 20 nt, synthetic construct
  source 1..20: mol_type = other RNA
ctgcaaggtggagctcatgt

SEQ ID NO: 1317 - RNA, 20 nt, synthetic construct
  source 1..20: mol_type = other RNA
ctgcacgggcacctccagtg

SEQ ID NO: 1318 - RNA, 20 nt, synthetic construct
  source 1..20: mol_type = other RNA
ctgccgaagcactgtcaccc

SEQ ID NO: 1319 - RNA, 20 nt, synthetic construct
  source 1..20: mol_type = other RNA
ctgctggccagtaccacagc

SEQ ID NO: 1320 - RNA, 20 nt, synthetic construct
  source 1..20: mol_type = other RNA
ctgctgtggtactggccagc

SEQ ID NO: 1321 - RNA, 20 nt, synthetic construct
  source 1..20: mol_type = other RNA
ctggagatgcatactcacac

SEQ ID NO: 1322 - RNA, 20 nt, synthetic construct
  source 1..20: mol_type = other RNA
ctggaggtgcccgtgcagat

SEQ ID NO: 1323 - RNA, 20 nt, synthetic construct
  source 1..20: mol_type = other RNA
ctggccagcagccgaggcat

SEQ ID NO: 1324 - RNA, 20 nt, synthetic construct
  source 1..20: mol_type = other RNA
ctggccagtaccacagcagg

SEQ ID NO: 1325 - RNA, 20 nt, synthetic construct
  source 1..20: mol_type = other RNA
ctggcgatgcctcggctgct

SEQ ID NO: 1326 - RNA, 20 nt, synthetic construct
  source 1..20: mol_type = other RNA
ctggctgtcagcctgccgaa

SEQ ID NO: 1327 - RNA, 20 nt, synthetic construct
  source 1..20: mol_type = other RNA
ctgggcataggcaacggaac

SEQ ID NO: 1328 - RNA, 20 nt, synthetic construct
  source 1..20: mol_type = other RNA
ctgggccacgtgcattgcta

SEQ ID NO: 1329 - RNA, 20 nt, synthetic construct
  source 1..20: mol_type = other RNA
ctgggttccgttgcctatgc

SEQ ID NO: 1330 - RNA, 20 nt, synthetic construct
  source 1..20: mol_type = other RNA
ctgtcacccggacctcagtg

SEQ ID NO: 1331 - RNA, 20 nt, synthetic construct
  source 1..20: mol_type = other RNA
ctgtcagcctgccgaagcac

SEQ ID NO: 1332 - RNA, 20 nt, synthetic construct
  source 1..20: mol_type = other RNA
ctgtgcggcaacctacatga

SEQ ID NO: 1333 - RNA, 20 nt, synthetic construct
  source 1..20: mol_type = other RNA
ctgtggtactggccagcagc

SEQ ID NO: 1334 - RNA, 20 nt, synthetic construct
  source 1..20: mol_type = other RNA
cttcagtcacctggctgtca

SEQ ID NO: 1335 - RNA, 20 nt, synthetic construct
  source 1..20: mol_type = other RNA
cttcctagatgattccatct

SEQ ID NO: 1336 - RNA, 20 nt, synthetic construct
  source 1..20: mol_type = other RNA
cttcggcaggctgacagcca

SEQ ID NO: 1337 - RNA, 20 nt, synthetic construct
  source 1..20: mol_type = other RNA
cttgatttccactggaggtg

SEQ ID NO: 1338 - RNA, 20 nt, synthetic construct
  source 1..20: mol_type = other RNA
cttgcagatgtagagtcccg

SEQ ID NO: 1339 - RNA, 20 nt, synthetic construct
  source 1..20: mol_type = other RNA
cttggatagtgaggttcact

SEQ ID NO: 1340 - RNA, 20 nt, synthetic construct
  source 1..20: mol_type = other RNA
ctttgcctggagatgcatac

SEQ ID NO: 1341 - RNA, 20 nt, synthetic construct
  source 1..20: mol_type = other RNA
ctttgctcaccaattacata

SEQ ID NO: 1342 - RNA, 20 nt, synthetic construct
  source 1..20: mol_type = other RNA
ctttggcttttccatgctag

SEQ ID NO: 1343 - RNA, 20 nt, synthetic construct
  source 1..20: mol_type = other RNA
ctttgtgtgtgagtatgcat

SEQ ID NO: 1344 - RNA, 20 nt, synthetic construct
  source 1..20: mol_type = other RNA
cttttccatgctagcaatgc

SEQ ID NO: 1345 - RNA, 20 nt, synthetic construct
  source 1..20: mol_type = other RNA
gaaaagccaaagggaactca

SEQ ID NO: 1346 - RNA, 20 nt, synthetic construct
  source 1..20: mol_type = other RNA
gaaatcaagtgaacctcact

SEQ ID NO: 1347 - RNA, 20 nt, synthetic construct
  source 1..20: mol_type = other RNA
gaaatggctttgctcaccaa

SEQ ID NO: 1348 - RNA, 20 nt, synthetic construct
  source 1..20: mol_type = other RNA
gaacccagatttatgtaatt

SEQ ID NO: 1349 - RNA, 20 nt, synthetic construct
  source 1..20: mol_type = other RNA
gaacctcactatccaaggac

SEQ ID NO: 1350 - RNA, 20 nt, synthetic construct
  source 1..20: mol_type = other RNA
gaagcactgtcacccggacc

SEQ ID NO: 1351 - RNA, 20 nt, synthetic construct
  source 1..20: mol_type = other RNA
gaaggtcaactcattcccca

SEQ ID NO: 1352 - RNA, 20 nt, synthetic construct
  source 1..20: mol_type = other RNA
gaagtctgtgcggcaaccta

SEQ ID NO: 1353 - RNA, 20 nt, synthetic construct
  source 1..20: mol_type = other RNA
gaatcatctaggaaggtcaa

SEQ ID NO: 1354 - RNA, 20 nt, synthetic construct
  source 1..20: mol_type = other RNA
gaatgagttgaccttcctag

SEQ ID NO: 1355 - RNA, 20 nt, synthetic construct
  source 1..20: mol_type = other RNA
gacacgggactctacatctg

SEQ ID NO: 1356 - RNA, 20 nt, synthetic construct
  source 1..20: mol_type = other RNA
gacagccaggtgactgaagt

SEQ ID NO: 1357 - RNA, 20 nt, synthetic construct
  source 1..20: mol_type = other RNA
gacagtgcttcggcaggctg

SEQ ID NO: 1358 - RNA, 20 nt, synthetic construct
  source 1..20: mol_type = other RNA
gacctcagtggctttgcctg

SEQ ID NO: 1359 - RNA, 20 nt, synthetic construct
  source 1..20: mol_type = other RNA
gaccttcctagatgattcca

SEQ ID NO: 1360 - RNA, 20 nt, synthetic construct
  source 1..20: mol_type = other RNA
gactctacatctgcaaggtg

SEQ ID NO: 1361 - RNA, 20 nt, synthetic construct
  source 1..20: mol_type = other RNA
gactgaagtctgtgcggcaa

SEQ ID NO: 1362 - RNA, 20 nt, synthetic construct
  source 1..20: mol_type = other RNA
gactgagggccatggacacg

SEQ ID NO: 1363 - RNA, 20 nt, synthetic construct
  source 1..20: mol_type = other RNA
gacttcagtcacctggctgt

SEQ ID NO: 1364 - RNA, 20 nt, synthetic construct
  source 1..20: mol_type = other RNA
gagatgcatactcacacaca

SEQ ID NO: 1365 - RNA, 20 nt, synthetic construct
  source 1..20: mol_type = other RNA
gagcaaagccatttcactga

SEQ ID NO: 1366 - RNA, 20 nt, synthetic construct
  source 1..20: mol_type = other RNA
gagctcatgtacccaccgcc

SEQ ID NO: 1367 - RNA, 20 nt, synthetic construct
  source 1..20: mol_type = other RNA
gagctccaccttgcagatgt

SEQ ID NO: 1368 - RNA, 20 nt, synthetic construct
  source 1..20: mol_type = other RNA
gaggcatcgccagctttgtg

SEQ ID NO: 1369 - RNA, 20 nt, synthetic construct
  source 1..20: mol_type = other RNA
gagggccatggacacgggac

SEQ ID NO: 1370 - RNA, 20 nt, synthetic construct
  source 1..20: mol_type = other RNA
gaggtccgggtgacagtgct

SEQ ID NO: 1371 - RNA, 20 nt, synthetic construct
  source 1..20: mol_type = other RNA
gaggtgcccgtgcagatgga

SEQ ID NO: 1372 - RNA, 20 nt, synthetic construct
  source 1..20: mol_type = other RNA
gaggttcacttgatttccac

SEQ ID NO: 1373 - RNA, 20 nt, synthetic construct
  source 1..20: mol_type = other RNA
gagtatgcatctccaggcaa

SEQ ID NO: 1374 - RNA, 20 nt, synthetic construct
  source 1..20: mol_type = other RNA
gagtcccgtgtccatggccc

SEQ ID NO: 1375 - RNA, 20 nt, synthetic construct
  source 1..20: mol_type = other RNA
gagttcactgagttcccttt

SEQ ID NO: 1376 - RNA, 20 nt, synthetic construct
  source 1..20: mol_type = other RNA
gagttccctttggcttttcc

SEQ ID NO: 1377 - RNA, 20 nt, synthetic construct
  source 1..20: mol_type = other RNA
gagttgaccttcctagatga

SEQ ID NO: 1378 - RNA, 20 nt, synthetic construct
  source 1..20: mol_type = other RNA
gatagtgaggttcacttgat

SEQ ID NO: 1379 - RNA, 20 nt, synthetic construct
  source 1..20: mol_type = other RNA
gatgattccatctgcacggg

SEQ ID NO: 1380 - RNA, 20 nt, synthetic construct
  source 1..20: mol_type = other RNA
gatgcatactcacacacaaa

SEQ ID NO: 1381 - RNA, 20 nt, synthetic construct
  source 1..20: mol_type = other RNA
gatgcctcggctgctggcca

SEQ ID NO: 1382 - RNA, 20 nt, synthetic construct
  source 1..20: mol_type = other RNA
gatggaatcatctaggaagg

SEQ ID NO: 1383 - RNA, 20 nt, synthetic construct
  source 1..20: mol_type = other RNA
gatggggaatgagttgacct

SEQ ID NO: 1384 - RNA, 20 nt, synthetic construct
  source 1..20: mol_type = other RNA
gatgtagagtcccgtgtcca

SEQ ID NO: 1385 - RNA, 20 nt, synthetic construct
  source 1..20: mol_type = other RNA
gattccatctgcacgggcac

SEQ ID NO: 1386 - RNA, 20 nt, synthetic construct
  source 1..20: mol_type = other RNA
gatttatgtaattggtgagc

SEQ ID NO: 1387 - RNA, 20 nt, synthetic construct
  source 1..20: mol_type = other RNA
gatttccactggaggtgccc

SEQ ID NO: 1388 - RNA, 20 nt, synthetic construct
  source 1..20: mol_type = other RNA
gcaaagccactgaggtccgg

SEQ ID NO: 1389 - RNA, 20 nt, synthetic construct
  source 1..20: mol_type = other RNA
gcaaagccatttcactgagt

SEQ ID NO: 1390 - RNA, 20 nt, synthetic construct
  source 1..20: mol_type = other RNA
gcaacaggtgtcaactcagt

SEQ ID NO: 1391 - RNA, 20 nt, synthetic construct
  source 1..20: mol_type = other RNA
gcaacctacatgatggggaa

SEQ ID NO: 1392 - RNA, 20 nt, synthetic construct
  source 1..20: mol_type = other RNA
gcaacggaacccagatttat

SEQ ID NO: 1393 - RNA, 20 nt, synthetic construct
  source 1..20: mol_type = other RNA
gcaaggtggagctcatgtac

SEQ ID NO: 1394 - RNA, 20 nt, synthetic construct
  source 1..20: mol_type = other RNA
gcaatgcacgtggcccagcc

SEQ ID NO: 1395 - RNA, 20 nt, synthetic construct
  source 1..20: mol_type = other RNA
gcacagacttcagtcacctg

SEQ ID NO: 1396 - RNA, 20 nt, synthetic construct
  source 1..20: mol_type = other RNA
gcacctccagtggaaatcaa

SEQ ID NO: 1397 - RNA, 20 nt, synthetic construct
  source 1..20: mol_type = other RNA
gcacgggcacctccagtgga

SEQ ID NO: 1398 - RNA, 20 nt, synthetic construct
  source 1..20: mol_type = other RNA
gcacgtggcccagcctgctg

SEQ ID NO: 1399 - RNA, 20 nt, synthetic construct
  source 1..20: mol_type = other RNA
gcactgtcacccggacctca

SEQ ID NO: 1400 - RNA, 20 nt, synthetic construct
  source 1..20: mol_type = other RNA
gcagatggaatcatctagga

SEQ ID NO: 1401 - RNA, 20 nt, synthetic construct
  source 1..20: mol_type = other RNA
gcagatgtagagtcccgtgt

SEQ ID NO: 1402 - RNA, 20 nt, synthetic construct
  source 1..20: mol_type = other RNA
gcagccgaggcatcgccagc

SEQ ID NO: 1403 - RNA, 20 nt, synthetic construct
  source 1..20: mol_type = other RNA
gcaggctgacagccaggtga

SEQ ID NO: 1404 - RNA, 20 nt, synthetic construct
  source 1..20: mol_type = other RNA
gcaggctgggccacgtgcat

SEQ ID NO: 1405 - RNA, 20 nt, synthetic construct
  source 1..20: mol_type = other RNA
gcatactcacacacaaagct

SEQ ID NO: 1406 - RNA, 20 nt, synthetic construct
  source 1..20: mol_type = other RNA
gcataggcaacggaacccag

SEQ ID NO: 1407 - RNA, 20 nt, synthetic construct
  source 1..20: mol_type = other RNA
gcatcgccagctttgtgtgt

SEQ ID NO: 1408 - RNA, 20 nt, synthetic construct
  source 1..20: mol_type = other RNA
gcatctccaggcaaagccac

SEQ ID NO: 1409 - RNA, 20 nt, synthetic construct
  source 1..20: mol_type = other RNA
gcatggaaaagccaaaggga

SEQ ID NO: 1410 - RNA, 20 nt, synthetic construct
  source 1..20: mol_type = other RNA
gcattgctagcatggaaaag

SEQ ID NO: 1411 - RNA, 20 nt, synthetic construct
  source 1..20: mol_type = other RNA
gccacgtgcattgctagcat

SEQ ID NO: 1412 - RNA, 20 nt, synthetic construct
  source 1..20: mol_type = other RNA
gccactgaggtccgggtgac

SEQ ID NO: 1413 - RNA, 20 nt, synthetic construct
  source 1..20: mol_type = other RNA
gccagcagccgaggcatcgc

SEQ ID NO: 1414 - RNA, 20 nt, synthetic construct
  source 1..20: mol_type = other RNA
gccagctttgtgtgtgagta

SEQ ID NO: 1415 - RNA, 20 nt, synthetic construct
  source 1..20: mol_type = other RNA
gccaggtgactgaagtctgt

SEQ ID NO: 1416 - RNA, 20 nt, synthetic construct
  source 1..20: mol_type = other RNA
gccagtaccacagcaggctg

SEQ ID NO: 1417 - RNA, 20 nt, synthetic construct
  source 1..20: mol_type = other RNA
gccatactacctgggcatag

SEQ ID NO: 1418 - RNA, 20 nt, synthetic construct
  source 1..20: mol_type = other RNA
gccatggacacgggactcta

SEQ ID NO: 1419 - RNA, 20 nt, synthetic construct
  source 1..20: mol_type = other RNA
gccatttcactgagttgaca

SEQ ID NO: 1420 - RNA, 20 nt, synthetic construct
  source 1..20: mol_type = other RNA
gcccagcctgctgtggtact

SEQ ID NO: 1421 - RNA, 20 nt, synthetic construct
  source 1..20: mol_type = other RNA
gcccaggtagtatggcggtg

SEQ ID NO: 1422 - RNA, 20 nt, synthetic construct
  source 1..20: mol_type = other RNA
gcccgtgcagatggaatcat

SEQ ID NO: 1423 - RNA, 20 nt, synthetic construct
  source 1..20: mol_type = other RNA
gccctcagtccttggatagt

SEQ ID NO: 1424 - RNA, 20 nt, synthetic construct
  source 1..20: mol_type = other RNA
gccgaagcactgtcacccgg

SEQ ID NO: 1425 - RNA, 20 nt, synthetic construct
  source 1..20: mol_type = other RNA
gccgaggcatcgccagcttt

SEQ ID NO: 1426 - RNA, 20 nt, synthetic construct
  source 1..20: mol_type = other RNA
gccgcacagacttcagtcac

SEQ ID NO: 1427 - RNA, 20 nt, synthetic construct
  source 1..20: mol_type = other RNA
gcctatgcccaggtagtatg

SEQ ID NO: 1428 - RNA, 20 nt, synthetic construct
  source 1..20: mol_type = other RNA
gcctcggctgctggccagta

SEQ ID NO: 1429 - RNA, 20 nt, synthetic construct
  source 1..20: mol_type = other RNA
gcctgccgaagcactgtcac

SEQ ID NO: 1430 - RNA, 20 nt, synthetic construct
  source 1..20: mol_type = other RNA
gcctgctgtggtactggcca

SEQ ID NO: 1431 - RNA, 20 nt, synthetic construct
  source 1..20: mol_type = other RNA
gcctggagatgcatactcac

SEQ ID NO: 1432 - RNA, 20 nt, synthetic construct
  source 1..20: mol_type = other RNA
gcgatgcctcggctgctggc

SEQ ID NO: 1433 - RNA, 20 nt, synthetic construct
  source 1..20: mol_type = other RNA
gcggcaacctacatgatggg

SEQ ID NO: 1434 - RNA, 20 nt, synthetic construct
  source 1..20: mol_type = other RNA
gcggtgggtacatgagctcc

SEQ ID NO: 1435 - RNA, 20 nt, synthetic construct
  source 1..20: mol_type = other RNA
gctagcaatgcacgtggccc

SEQ ID NO: 1436 - RNA, 20 nt, synthetic construct
  source 1..20: mol_type = other RNA
gctagcatggaaaagccaaa

SEQ ID NO: 1437 - RNA, 20 nt, synthetic construct
  source 1..20: mol_type = other RNA
gctcaccaattacataaatc

SEQ ID NO: 1438 - RNA, 20 nt, synthetic construct
  source 1..20: mol_type = other RNA
gctcatgtacccaccgccat

SEQ ID NO: 1439 - RNA, 20 nt, synthetic construct
  source 1..20: mol_type = other RNA
gctccaccttgcagatgtag

SEQ ID NO: 1440 - RNA, 20 nt, synthetic construct
  source 1..20: mol_type = other RNA
gctgacagccaggtgactga

SEQ ID NO: 1441 - RNA, 20 nt, synthetic construct
  source 1..20: mol_type = other RNA
gctgctggccagtaccacag

SEQ ID NO: 1442 - RNA, 20 nt, synthetic construct
  source 1..20: mol_type = other RNA
gctggccagtaccacagcag

SEQ ID NO: 1443 - RNA, 20 nt, synthetic construct
  source 1..20: mol_type = other RNA
gctggcgatgcctcggctgc

SEQ ID NO: 1444 - RNA, 20 nt, synthetic construct
  source 1..20: mol_type = other RNA
gctgggccacgtgcattgct

SEQ ID NO: 1445 - RNA, 20 nt, synthetic construct
  source 1..20: mol_type = other RNA
gctgtcagcctgccgaagca

SEQ ID NO: 1446 - RNA, 20 nt, synthetic construct
  source 1..20: mol_type = other RNA
gctgtggtactggccagcag

SEQ ID NO: 1447 - RNA, 20 nt, synthetic construct
  source 1..20: mol_type = other RNA
gcttcggcaggctgacagcc

SEQ ID NO: 1448 - RNA, 20 nt, synthetic construct
  source 1..20: mol_type = other RNA
gctttgcctggagatgcata

SEQ ID NO: 1449 - RNA, 20 nt, synthetic construct
  source 1..20: mol_type = other RNA
gctttgctcaccaattacat

SEQ ID NO: 1450 - RNA, 20 nt, synthetic construct
  source 1..20: mol_type = other RNA
gctttgtgtgtgagtatgca

SEQ ID NO: 1451 - RNA, 20 nt, synthetic construct
  source 1..20: mol_type = other RNA
gcttttccatgctagcaatg

SEQ ID NO: 1452 - RNA, 20 nt, synthetic construct
  source 1..20: mol_type = other RNA
ggaaaagccaaagggaactc

SEQ ID NO: 1453 - RNA, 20 nt, synthetic construct
  source 1..20: mol_type = other RNA
ggaaatcaagtgaacctcac

SEQ ID NO: 1454 - RNA, 20 nt, synthetic construct
  source 1..20: mol_type = other RNA
ggaacccagatttatgtaat

SEQ ID NO: 1455 - RNA, 20 nt, synthetic construct
  source 1..20: mol_type = other RNA
ggaaggtcaactcattcccc

SEQ ID NO: 1456 - RNA, 20 nt, synthetic construct
  source 1..20: mol_type = other RNA
ggaatcatctaggaaggtca

SEQ ID NO: 1457 - RNA, 20 nt, synthetic construct
  source 1..20: mol_type = other RNA
ggaatgagttgaccttccta

SEQ ID NO: 1458 - RNA, 20 nt, synthetic construct
  source 1..20: mol_type = other RNA
ggacacgggactctacatct

SEQ ID NO: 1459 - RNA, 20 nt, synthetic construct
  source 1..20: mol_type = other RNA
ggacctcagtggctttgcct

SEQ ID NO: 1460 - RNA, 20 nt, synthetic construct
  source 1..20: mol_type = other RNA
ggactctacatctgcaaggt

SEQ ID NO: 1461 - RNA, 20 nt, synthetic construct
  source 1..20: mol_type = other RNA
ggactgagggccatggacac

SEQ ID NO: 1462 - RNA, 20 nt, synthetic construct
  source 1..20: mol_type = other RNA
ggagatgcatactcacacac

SEQ ID NO: 1463 - RNA, 20 nt, synthetic construct
  source 1..20: mol_type = other RNA
ggagctcatgtacccaccgc

SEQ ID NO: 1464 - RNA, 20 nt, synthetic construct
  source 1..20: mol_type = other RNA
ggaggtgcccgtgcagatgg

SEQ ID NO: 1465 - RNA, 20 nt, synthetic construct
  source 1..20: mol_type = other RNA
ggatagtgaggttcacttga

SEQ ID NO: 1466 - RNA, 20 nt, synthetic construct
  source 1..20: mol_type = other RNA
ggcaaagccactgaggtccg

SEQ ID NO: 1467 - RNA, 20 nt, synthetic construct
  source 1..20: mol_type = other RNA
ggcaacctacatgatgggga

SEQ ID NO: 1468 - RNA, 20 nt, synthetic construct
  source 1..20: mol_type = other RNA
ggcaacggaacccagattta

SEQ ID NO: 1469 - RNA, 20 nt, synthetic construct
  source 1..20: mol_type = other RNA
ggcacctccagtggaaatca

SEQ ID NO: 1470 - RNA, 20 nt, synthetic construct
  source 1..20: mol_type = other RNA
ggcaggctgacagccaggtg

SEQ ID NO: 1471 - RNA, 20 nt, synthetic construct
  source 1..20: mol_type = other RNA
ggcataggcaacggaaccca

SEQ ID NO: 1472 - RNA, 20 nt, synthetic construct
  source 1..20: mol_type = other RNA
ggcatcgccagctttgtgtg

SEQ ID NO: 1473 - RNA, 20 nt, synthetic construct
  source 1..20: mol_type = other RNA
ggccacgtgcattgctagca

SEQ ID NO: 1474 - RNA, 20 nt, synthetic construct
  source 1..20: mol_type = other RNA
ggccagcagccgaggcatcg

SEQ ID NO: 1475 - RNA, 20 nt, synthetic construct
  source 1..20: mol_type = other RNA
ggccagtaccacagcaggct

SEQ ID NO: 1476 - RNA, 20 nt, synthetic construct
  source 1..20: mol_type = other RNA
ggccatggacacgggactct

SEQ ID NO: 1477 - RNA, 20 nt, synthetic construct
  source 1..20: mol_type = other RNA
ggcccagcctgctgtggtac

SEQ ID NO: 1478 - RNA, 20 nt, synthetic construct
  source 1..20: mol_type = other RNA
ggccctcagtccttggatag

SEQ ID NO: 1479 - RNA, 20 nt, synthetic construct
  source 1..20: mol_type = other RNA
ggcgatgcctcggctgctgg

SEQ ID NO: 1480 - RNA, 20 nt, synthetic construct
  source 1..20: mol_type = other RNA
ggcggtgggtacatgagctc

SEQ ID NO: 1481 - RNA, 20 nt, synthetic construct
  source 1..20: mol_type = other RNA
ggctgacagccaggtgactg

SEQ ID NO: 1482 - RNA, 20 nt, synthetic construct
  source 1..20: mol_type = other RNA
ggctgctggccagtaccaca

SEQ ID NO: 1483 - RNA, 20 nt, synthetic construct
  source 1..20: mol_type = other RNA
ggctgggccacgtgcattgc

SEQ ID NO: 1484 - RNA, 20 nt, synthetic construct
  source 1..20: mol_type = other RNA
ggctgtcagcctgccgaagc

SEQ ID NO: 1485 - RNA, 20 nt, synthetic construct
  source 1..20: mol_type = other RNA
ggctttgcctggagatgcat

SEQ ID NO: 1486 - RNA, 20 nt, synthetic construct
  source 1..20: mol_type = other RNA
ggctttgctcaccaattaca

SEQ ID NO: 1487 - RNA, 20 nt, synthetic construct
  source 1..20: mol_type = other RNA
ggcttttccatgctagcaat

SEQ ID NO: 1488 - RNA, 20 nt, synthetic construct
  source 1..20: mol_type = other RNA
gggaatgagttgaccttcct

SEQ ID NO: 1489 - RNA, 20 nt, synthetic construct
  source 1..20: mol_type = other RNA
gggactctacatctgcaagg

SEQ ID NO: 1490 - RNA, 20 nt, synthetic construct
  source 1..20: mol_type = other RNA
gggcacctccagtggaaatc

SEQ ID NO: 1491 - RNA, 20 nt, synthetic construct
  source 1..20: mol_type = other RNA
gggcataggcaacggaaccc

SEQ ID NO: 1492 - RNA, 20 nt, synthetic construct
  source 1..20: mol_type = other RNA
gggccacgtgcattgctagc

SEQ ID NO: 1493 - RNA, 20 nt, synthetic construct
  source 1..20: mol_type = other RNA
gggccatggacacgggactc

SEQ ID NO: 1494 - RNA, 20 nt, synthetic construct
  source 1..20: mol_type = other RNA
ggggaatgagttgaccttcc

SEQ ID NO: 1495 - RNA, 20 nt, synthetic construct
  source 1..20: mol_type = other RNA
gggtacatgagctccacctt

SEQ ID NO: 1496 - RNA, 20 nt, synthetic construct
  source 1..20: mol_type = other RNA
gggtgacagtgcttcggcag

SEQ ID NO: 1497 - RNA, 20 nt, synthetic construct
  source 1..20: mol_type = other RNA
gggttccgttgcctatgccc

SEQ ID NO: 1498 - RNA, 20 nt, synthetic construct
  source 1..20: mol_type = other RNA
ggtacatgagctccaccttg

SEQ ID NO: 1499 - RNA, 20 nt, synthetic construct
  source 1..20: mol_type = other RNA
ggtactggccagcagccgag

SEQ ID NO: 1500 - RNA, 20 nt, synthetic construct
  source 1..20: mol_type = other RNA
ggtagtatggcggtgggtac

SEQ ID NO: 1501 - RNA, 20 nt, synthetic construct
  source 1..20: mol_type = other RNA
ggtcaactcattccccatca

SEQ ID NO: 1502 - RNA, 20 nt, synthetic construct
  source 1..20: mol_type = other RNA
ggtccgggtgacagtgcttc

SEQ ID NO: 1503 - RNA, 20 nt, synthetic construct
  source 1..20: mol_type = other RNA
ggtgacagtgcttcggcagg

SEQ ID NO: 1504 - RNA, 20 nt, synthetic construct
  source 1..20: mol_type = other RNA
ggtgactgaagtctgtgcgg

SEQ ID NO: 1505 - RNA, 20 nt, synthetic construct
  source 1..20: mol_type = other RNA
ggtgagcaaagccatttcac

SEQ ID NO: 1506 - RNA, 20 nt, synthetic construct
  source 1..20: mol_type = other RNA
ggtgcccgtgcagatggaat

SEQ ID NO: 1507 - RNA, 20 nt, synthetic construct
  source 1..20: mol_type = other RNA
ggtggagctcatgtacccac

SEQ ID NO: 1508 - RNA, 20 nt, synthetic construct
  source 1..20: mol_type = other RNA
ggtgggtacatgagctccac

SEQ ID NO: 1509 - RNA, 20 nt, synthetic construct
  source 1..20: mol_type = other RNA
ggtgtcaactcagtgaaatg

SEQ ID NO: 1510 - RNA, 20 nt, synthetic construct
  source 1..20: mol_type = other RNA
ggttcacttgatttccactg

SEQ ID NO: 1511 - RNA, 20 nt, synthetic construct
  source 1..20: mol_type = other RNA
ggttccgttgcctatgccca

SEQ ID NO: 1512 - RNA, 20 nt, synthetic construct
  source 1..20: mol_type = other RNA
ggttgccgcacagacttcag

SEQ ID NO: 1513 - RNA, 20 nt, synthetic construct
  source 1..20: mol_type = other RNA
gtaattggtgagcaaagcca

SEQ ID NO: 1514 - RNA, 20 nt, synthetic construct
  source 1..20: mol_type = other RNA
gtacatgagctccaccttgc

SEQ ID NO: 1515 - RNA, 20 nt, synthetic construct
  source 1..20: mol_type = other RNA
gtaccacagcaggctgggcc

SEQ ID NO: 1516 - RNA, 20 nt, synthetic construct
  source 1..20: mol_type = other RNA
gtacccaccgccatactacc

SEQ ID NO: 1517 - RNA, 20 nt, synthetic construct
  source 1..20: mol_type = other RNA
gtactggccagcagccgagg

SEQ ID NO: 1518 - RNA, 20 nt, synthetic construct
  source 1..20: mol_type = other RNA
gtagagtcccgtgtccatgg

SEQ ID NO: 1519 - RNA, 20 nt, synthetic construct
  source 1..20: mol_type = other RNA
gtaggttgccgcacagactt

SEQ ID NO: 1520 - RNA, 20 nt, synthetic construct
  source 1..20: mol_type = other RNA
gtagtatggcggtgggtaca

SEQ ID NO: 1521 - RNA, 20 nt, synthetic construct
  source 1..20: mol_type = other RNA
gtatgcatctccaggcaaag

SEQ ID NO: 1522 - RNA, 20 nt, synthetic construct
  source 1..20: mol_type = other RNA
gtatggcggtgggtacatga

SEQ ID NO: 1523 - RNA, 20 nt, synthetic construct
  source 1..20: mol_type = other RNA
gtcaactcagtgaaatggct

SEQ ID NO: 1524 - RNA, 20 nt, synthetic construct
  source 1..20: mol_type = other RNA
gtcaactcattccccatcat

SEQ ID NO: 1525 - RNA, 20 nt, synthetic construct
  source 1..20: mol_type = other RNA
gtcacccggacctcagtggc

SEQ ID NO: 1526 - RNA, 20 nt, synthetic construct
  source 1..20: mol_type = other RNA
gtcacctggctgtcagcctg

SEQ ID NO: 1527 - RNA, 20 nt, synthetic construct
  source 1..20: mol_type = other RNA
gtcagcctgccgaagcactg

SEQ ID NO: 1528 - RNA, 20 nt, synthetic construct
  source 1..20: mol_type = other RNA
gtccatggccctcagtcctt

SEQ ID NO: 1529 - RNA, 20 nt, synthetic construct
  source 1..20: mol_type = other RNA
gtcccgtgtccatggccctc

SEQ ID NO: 1530 - RNA, 20 nt, synthetic construct
  source 1..20: mol_type = other RNA
gtccgggtgacagtgcttcg

SEQ ID NO: 1531 - RNA, 20 nt, synthetic construct
  source 1..20: mol_type = other RNA
gtccttggatagtgaggttc

SEQ ID NO: 1532 - RNA, 20 nt, synthetic construct
  source 1..20: mol_type = other RNA
gtctgtgcggcaacctacat

SEQ ID NO: 1533 - RNA, 20 nt, synthetic construct
  source 1..20: mol_type = other RNA
gtgaaatggctttgctcacc

SEQ ID NO: 1534 - RNA, 20 nt, synthetic construct
  source 1..20: mol_type = other RNA
gtgaacctcactatccaagg

SEQ ID NO: 1535 - RNA, 20 nt, synthetic construct
  source 1..20: mol_type = other RNA
gtgacagtgcttcggcaggc

SEQ ID NO: 1536 - RNA, 20 nt, synthetic construct
  source 1..20: mol_type = other RNA
gtgactgaagtctgtgcggc

SEQ ID NO: 1537 - RNA, 20 nt, synthetic construct
  source 1..20: mol_type = other RNA
gtgagcaaagccatttcact

SEQ ID NO: 1538 - RNA, 20 nt, synthetic construct
  source 1..20: mol_type = other RNA
gtgaggttcacttgatttcc

SEQ ID NO: 1539 - RNA, 20 nt, synthetic construct
  source 1..20: mol_type = other RNA
gtgagtatgcatctccaggc

SEQ ID NO: 1540 - RNA, 20 nt, synthetic construct
  source 1..20: mol_type = other RNA
gtgcagatggaatcatctag

SEQ ID NO: 1541 - RNA, 20 nt, synthetic construct
  source 1..20: mol_type = other RNA
gtgcattgctagcatggaaa

SEQ ID NO: 1542 - RNA, 20 nt, synthetic construct
  source 1..20: mol_type = other RNA
gtgcccgtgcagatggaatc

SEQ ID NO: 1543 - RNA, 20 nt, synthetic construct
  source 1..20: mol_type = other RNA
gtgcggcaacctacatgatg

SEQ ID NO: 1544 - RNA, 20 nt, synthetic construct
  source 1..20: mol_type = other RNA
gtgcttcggcaggctgacag

SEQ ID NO: 1545 - RNA, 20 nt, synthetic construct
  source 1..20: mol_type = other RNA
gtggaaatcaagtgaacctc

SEQ ID NO: 1546 - RNA, 20 nt, synthetic construct
  source 1..20: mol_type = other RNA
gtggagctcatgtacccacc

SEQ ID NO: 1547 - RNA, 20 nt, synthetic construct
  source 1..20: mol_type = other RNA
gtggcccagcctgctgtggt

SEQ ID NO: 1548 - RNA, 20 nt, synthetic construct
  source 1..20: mol_type = other RNA
gtggctttgcctggagatgc

SEQ ID NO: 1549 - RNA, 20 nt, synthetic construct
  source 1..20: mol_type = other RNA
gtgggtacatgagctccacc

SEQ ID NO: 1550 - RNA, 20 nt, synthetic construct
  source 1..20: mol_type = other RNA
gtggtactggccagcagccg

SEQ ID NO: 1551 - RNA, 20 nt, synthetic construct
  source 1..20: mol_type = other RNA
gtgtcaactcagtgaaatgg

SEQ ID NO: 1552 - RNA, 20 nt, synthetic construct
  source 1..20: mol_type = other RNA
gtgtccatggccctcagtcc

SEQ ID NO: 1553 - RNA, 20 nt, synthetic construct
  source 1..20: mol_type = other RNA
gtgtgagtatgcatctccag

SEQ ID NO: 1554 - RNA, 20 nt, synthetic construct
  source 1..20: mol_type = other RNA
gtgtgtgagtatgcatctcc

SEQ ID NO: 1555 - RNA, 20 nt, synthetic construct
  source 1..20: mol_type = other RNA
gttcactgagttccctttgg

SEQ ID NO: 1556 - RNA, 20 nt, synthetic construct
  source 1..20: mol_type = other RNA
gttcacttgatttccactgg

SEQ ID NO: 1557 - RNA, 20 nt, synthetic construct
  source 1..20: mol_type = other RNA
gttccctttggcttttccat

SEQ ID NO: 1558 - RNA, 20 nt, synthetic construct
  source 1..20: mol_type = other RNA
gttccgttgcctatgcccag

SEQ ID NO: 1559 - RNA, 20 nt, synthetic construct
  source 1..20: mol_type = other RNA
gttgaccttcctagatgatt

SEQ ID NO: 1560 - RNA, 20 nt, synthetic construct
  source 1..20: mol_type = other RNA
gttgccgcacagacttcagt

SEQ ID NO: 1561 - RNA, 20 nt, synthetic construct
  source 1..20: mol_type = other RNA
gttgcctatgcccaggtagt

SEQ ID NO: 1562 - RNA, 20 nt, synthetic construct
  source 1..20: mol_type = other RNA
taaatctgggttccgttgcc

SEQ ID NO: 1563 - RNA, 20 nt, synthetic construct
  source 1..20: mol_type = other RNA
taattggtgagcaaagccat

SEQ ID NO: 1564 - RNA, 20 nt, synthetic construct
  source 1..20: mol_type = other RNA
tacataaatctgggttccgt

SEQ ID NO: 1565 - RNA, 20 nt, synthetic construct
  source 1..20: mol_type = other RNA
tacatctgcaaggtggagct

SEQ ID NO: 1566 - RNA, 20 nt, synthetic construct
  source 1..20: mol_type = other RNA
tacatgagctccaccttgca

SEQ ID NO: 1567 - RNA, 20 nt, synthetic construct
  source 1..20: mol_type = other RNA
tacatgatggggaatgagtt

SEQ ID NO: 1568 - RNA, 20 nt, synthetic construct
  source 1..20: mol_type = other RNA
taccacagcaggctgggcca

SEQ ID NO: 1569 - RNA, 20 nt, synthetic construct
  source 1..20: mol_type = other RNA
tacccaccgccatactacct

SEQ ID NO: 1570 - RNA, 20 nt, synthetic construct
  source 1..20: mol_type = other RNA
tacctgggcataggcaacgg

SEQ ID NO: 1571 - RNA, 20 nt, synthetic construct
  source 1..20: mol_type = other RNA
tactacctgggcataggcaa

SEQ ID NO: 1572 - RNA, 20 nt, synthetic construct
  source 1..20: mol_type = other RNA
tactcacacacaaagctggc

SEQ ID NO: 1573 - RNA, 20 nt, synthetic construct
  source 1..20: mol_type = other RNA
tactggccagcagccgaggc

SEQ ID NO: 1574 - RNA, 20 nt, synthetic construct
  source 1..20: mol_type = other RNA
tagagtcccgtgtccatggc

SEQ ID NO: 1575 - RNA, 20 nt, synthetic construct
  source 1..20: mol_type = other RNA
tagatgattccatctgcacg

SEQ ID NO: 1576 - RNA, 20 nt, synthetic construct
  source 1..20: mol_type = other RNA
tagcaatgcacgtggcccag

SEQ ID NO: 1577 - RNA, 20 nt, synthetic construct
  source 1..20: mol_type = other RNA
tagcatggaaaagccaaagg

SEQ ID NO: 1578 - RNA, 20 nt, synthetic construct
  source 1..20: mol_type = other RNA
taggaaggtcaactcattcc

SEQ ID NO: 1579 - RNA, 20 nt, synthetic construct
  source 1..20: mol_type = other RNA
taggcaacggaacccagatt

SEQ ID NO: 1580 - RNA, 20 nt, synthetic construct
  source 1..20: mol_type = other RNA
taggttgccgcacagacttc

SEQ ID NO: 1581 - RNA, 20 nt, synthetic construct
  source 1..20: mol_type = other RNA
tagtatggcggtgggtacat

SEQ ID NO: 1582 - RNA, 20 nt, synthetic construct
  source 1..20: mol_type = other RNA
tagtgaggttcacttgattt

SEQ ID NO: 1583 - RNA, 20 nt, synthetic construct
  source 1..20: mol_type = other RNA
tatccaaggactgagggcca

SEQ ID NO: 1584 - RNA, 20 nt, synthetic construct
  source 1..20: mol_type = other RNA
tatgcatctccaggcaaagc

SEQ ID NO: 1585 - RNA, 20 nt, synthetic construct
  source 1..20: mol_type = other RNA
tatgcccaggtagtatggcg

SEQ ID NO: 1586 - RNA, 20 nt, synthetic construct
  source 1..20: mol_type = other RNA
tatggcggtgggtacatgag

SEQ ID NO: 1587 - RNA, 20 nt, synthetic construct
  source 1..20: mol_type = other RNA
tatgtaattggtgagcaaag

SEQ ID NO: 1588 - RNA, 20 nt, synthetic construct
  source 1..20: mol_type = other RNA
tcaactcagtgaaatggctt

SEQ ID NO: 1589 - RNA, 20 nt, synthetic construct
  source 1..20: mol_type = other RNA
tcaactcattccccatcatg

SEQ ID NO: 1590 - RNA, 20 nt, synthetic construct
  source 1..20: mol_type = other RNA
tcaagtgaacctcactatcc

SEQ ID NO: 1591 - RNA, 20 nt, synthetic construct
  source 1..20: mol_type = other RNA
tcacacacaaagctggcgat

SEQ ID NO: 1592 - RNA, 20 nt, synthetic construct
  source 1..20: mol_type = other RNA
tcaccaattacataaatctg

SEQ ID NO: 1593 - RNA, 20 nt, synthetic construct
  source 1..20: mol_type = other RNA
tcacccggacctcagtggct

SEQ ID NO: 1594 - RNA, 20 nt, synthetic construct
  source 1..20: mol_type = other RNA
tcacctggctgtcagcctgc

SEQ ID NO: 1595 - RNA, 20 nt, synthetic construct
  source 1..20: mol_type = other RNA
tcactatccaaggactgagg

SEQ ID NO: 1596 - RNA, 20 nt, synthetic construct
  source 1..20: mol_type = other RNA
tcactgagttccctttggct

SEQ ID NO: 1597 - RNA, 20 nt, synthetic construct
  source 1..20: mol_type = other RNA
tcacttgatttccactggag

SEQ ID NO: 1598 - RNA, 20 nt, synthetic construct
  source 1..20: mol_type = other RNA
tcagcctgccgaagcactgt

SEQ ID NO: 1599 - RNA, 20 nt, synthetic construct
  source 1..20: mol_type = other RNA
tcagtcacctggctgtcagc

SEQ ID NO: 1600 - RNA, 20 nt, synthetic construct
  source 1..20: mol_type = other RNA
tcagtccttggatagtgagg

SEQ ID NO: 1601 - RNA, 20 nt, synthetic construct
  source 1..20: mol_type = other RNA
tcagtgaaatggctttgctc

SEQ ID NO: 1602 - RNA, 20 nt, synthetic construct
  source 1..20: mol_type = other RNA
tcagtggctttgcctggaga

SEQ ID NO: 1603 - RNA, 20 nt, synthetic construct
  source 1..20: mol_type = other RNA
tcatctaggaaggtcaactc

SEQ ID NO: 1604 - RNA, 20 nt, synthetic construct
  source 1..20: mol_type = other RNA
tcatgtacccaccgccatac

SEQ ID NO: 1605 - RNA, 20 nt, synthetic construct
  source 1..20: mol_type = other RNA
tcatgtaggttgccgcacag

SEQ ID NO: 1606 - RNA, 20 nt, synthetic construct
  source 1..20: mol_type = other RNA
tcattccccatcatgtaggt

SEQ ID NO: 1607 - RNA, 20 nt, synthetic construct
  source 1..20: mol_type = other RNA
tccaaggactgagggccatg

SEQ ID NO: 1608 - RNA, 20 nt, synthetic construct
  source 1..20: mol_type = other RNA
tccaccttgcagatgtagag

SEQ ID NO: 1609 - RNA, 20 nt, synthetic construct
  source 1..20: mol_type = other RNA
tccactggaggtgcccgtgc

SEQ ID NO: 1610 - RNA, 20 nt, synthetic construct
  source 1..20: mol_type = other RNA
tccaggcaaagccactgagg

SEQ ID NO: 1611 - RNA, 20 nt, synthetic construct
  source 1..20: mol_type = other RNA
tccagtggaaatcaagtgaa

SEQ ID NO: 1612 - RNA, 20 nt, synthetic construct
  source 1..20: mol_type = other RNA
tccatctgcacgggcacctc

SEQ ID NO: 1613 - RNA, 20 nt, synthetic construct
  source 1..20: mol_type = other RNA
tccatgctagcaatgcacgt

SEQ ID NO: 1614 - RNA, 20 nt, synthetic construct
  source 1..20: mol_type = other RNA
tccatggccctcagtccttg

SEQ ID NO: 1615 - RNA, 20 nt, synthetic construct
  source 1..20: mol_type = other RNA
tccccatcatgtaggttgcc

SEQ ID NO: 1616 - RNA, 20 nt, synthetic construct
  source 1..20: mol_type = other RNA
tcccgtgtccatggccctca

SEQ ID NO: 1617 - RNA, 20 nt, synthetic construct
  source 1..20: mol_type = other RNA
tccctttggcttttccatgc

SEQ ID NO: 1618 - RNA, 20 nt, synthetic construct
  source 1..20: mol_type = other RNA
tccgggtgacagtgcttcgg

SEQ ID NO: 1619 - RNA, 20 nt, synthetic construct
  source 1..20: mol_type = other RNA
tccgttgcctatgcccaggt

SEQ ID NO: 1620 - RNA, 20 nt, synthetic construct
  source 1..20: mol_type = other RNA
tcctagatgattccatctgc

SEQ ID NO: 1621 - RNA, 20 nt, synthetic construct
  source 1..20: mol_type = other RNA
tccttggatagtgaggttca

SEQ ID NO: 1622 - RNA, 20 nt, synthetic construct
  source 1..20: mol_type = other RNA
tcgccagctttgtgtgtgag

SEQ ID NO: 1623 - RNA, 20 nt, synthetic construct
  source 1..20: mol_type = other RNA
tcggcaggctgacagccagg

SEQ ID NO: 1624 - RNA, 20 nt, synthetic construct
  source 1..20: mol_type = other RNA
tcggctgctggccagtacca

SEQ ID NO: 1625 - RNA, 20 nt, synthetic construct
  source 1..20: mol_type = other RNA
tctacatctgcaaggtggag

SEQ ID NO: 1626 - RNA, 20 nt, synthetic construct
  source 1..20: mol_type = other RNA
tctaggaaggtcaactcatt

SEQ ID NO: 1627 - RNA, 20 nt, synthetic construct
  source 1..20: mol_type = other RNA
tctccaggcaaagccactga

SEQ ID NO: 1628 - RNA, 20 nt, synthetic construct
  source 1..20: mol_type = other RNA
tctgcaaggtggagctcatg

SEQ ID NO: 1629 - RNA, 20 nt, synthetic construct
  source 1..20: mol_type = other RNA
tctgcacgggcacctccagt

SEQ ID NO: 1630 - RNA, 20 nt, synthetic construct
  source 1..20: mol_type = other RNA
tctgggttccgttgcctatg

SEQ ID NO: 1631 - RNA, 20 nt, synthetic construct
  source 1..20: mol_type = other RNA
tctgtgcggcaacctacatg

SEQ ID NO: 1632 - RNA, 20 nt, synthetic construct
  source 1..20: mol_type = other RNA
tgaaatggctttgctcacca

SEQ ID NO: 1633 - RNA, 20 nt, synthetic construct
  source 1..20: mol_type = other RNA
tgaacctcactatccaagga

SEQ ID NO: 1634 - RNA, 20 nt, synthetic construct
  source 1..20: mol_type = other RNA
tgaagtctgtgcggcaacct

SEQ ID NO: 1635 - RNA, 20 nt, synthetic construct
  source 1..20: mol_type = other RNA
tgacagccaggtgactgaag

SEQ ID NO: 1636 - RNA, 20 nt, synthetic construct
  source 1..20: mol_type = other RNA
tgacagtgcttcggcaggct

SEQ ID NO: 1637 - RNA, 20 nt, synthetic construct
  source 1..20: mol_type = other RNA
tgaccttcctagatgattcc

SEQ ID NO: 1638 - RNA, 20 nt, synthetic construct
  source 1..20: mol_type = other RNA
tgactgaagtctgtgcggca

SEQ ID NO: 1639 - RNA, 20 nt, synthetic construct
  source 1..20: mol_type = other RNA
tgagcaaagccatttcactg

SEQ ID NO: 1640 - RNA, 20 nt, synthetic construct
  source 1..20: mol_type = other RNA
tgagctccaccttgcagatg

SEQ ID NO: 1641 - RNA, 20 nt, synthetic construct
  source 1..20: mol_type = other RNA
tgagggccatggacacggga

SEQ ID NO: 1642 - RNA, 20 nt, synthetic construct
  source 1..20: mol_type = other RNA
tgaggtccgggtgacagtgc

SEQ ID NO: 1643 - RNA, 20 nt, synthetic construct
  source 1..20: mol_type = other RNA
tgaggttcacttgatttcca

SEQ ID NO: 1644 - RNA, 20 nt, synthetic construct
  source 1..20: mol_type = other RNA
tgagtatgcatctccaggca

SEQ ID NO: 1645 - RNA, 20 nt, synthetic construct
  source 1..20: mol_type = other RNA
tgagttcactgagttccctt

SEQ ID NO: 1646 - RNA, 20 nt, synthetic construct
  source 1..20: mol_type = other RNA
tgagttccctttggcttttc

SEQ ID NO: 1647 - RNA, 20 nt, synthetic construct
  source 1..20: mol_type = other RNA
tgagttgaccttcctagatg

SEQ ID NO: 1648 - RNA, 20 nt, synthetic construct
  source 1..20: mol_type = other RNA
tgatggggaatgagttgacc

SEQ ID NO: 1649 - RNA, 20 nt, synthetic construct
  source 1..20: mol_type = other RNA
tgattccatctgcacgggca

SEQ ID NO: 1650 - RNA, 20 nt, synthetic construct
  source 1..20: mol_type = other RNA
tgatttccactggaggtgcc

SEQ ID NO: 1651 - RNA, 20 nt, synthetic construct
  source 1..20: mol_type = other RNA
tgcaacaggtgtcaactcag

SEQ ID NO: 1652 - RNA, 20 nt, synthetic construct
  source 1..20: mol_type = other RNA
tgcaaggtggagctcatgta

SEQ ID NO: 1653 - RNA, 20 nt, synthetic construct
  source 1..20: mol_type = other RNA
tgcacgggcacctccagtgg

SEQ ID NO: 1654 - RNA, 20 nt, synthetic construct
  source 1..20: mol_type = other RNA
tgcacgtggcccagcctgct

SEQ ID NO: 1655 - RNA, 20 nt, synthetic construct
  source 1..20: mol_type = other RNA
tgcagatggaatcatctagg

SEQ ID NO: 1656 - RNA, 20 nt, synthetic construct
  source 1..20: mol_type = other RNA
tgcagatgtagagtcccgtg

SEQ ID NO: 1657 - RNA, 20 nt, synthetic construct
  source 1..20: mol_type = other RNA
tgcatactcacacacaaagc

SEQ ID NO: 1658 - RNA, 20 nt, synthetic construct
  source 1..20: mol_type = other RNA
tgcatctccaggcaaagcca

SEQ ID NO: 1659 - RNA, 20 nt, synthetic construct
  source 1..20: mol_type = other RNA
tgcattgctagcatggaaaa

SEQ ID NO: 1660 - RNA, 20 nt, synthetic construct
  source 1..20: mol_type = other RNA
tgcccaggtagtatggcggt

SEQ ID NO: 1661 - RNA, 20 nt, synthetic construct
  source 1..20: mol_type = other RNA
tgcccgtgcagatggaatca

SEQ ID NO: 1662 - RNA, 20 nt, synthetic construct
  source 1..20: mol_type = other RNA
tgccgaagcactgtcacccg

SEQ ID NO: 1663 - RNA, 20 nt, synthetic construct
  source 1..20: mol_type = other RNA
tgccgcacagacttcagtca

SEQ ID NO: 1664 - RNA, 20 nt, synthetic construct
  source 1..20: mol_type = other RNA
tgcctatgcccaggtagtat

SEQ ID NO: 1665 - RNA, 20 nt, synthetic construct
  source 1..20: mol_type = other RNA
tgcctcggctgctggccagt

SEQ ID NO: 1666 - RNA, 20 nt, synthetic construct
  source 1..20: mol_type = other RNA
tgcctggagatgcatactca

SEQ ID NO: 1667 - RNA, 20 nt, synthetic construct
  source 1..20: mol_type = other RNA
tgcggcaacctacatgatgg

SEQ ID NO: 1668 - RNA, 20 nt, synthetic construct
  source 1..20: mol_type = other RNA
tgctagcaatgcacgtggcc

SEQ ID NO: 1669 - RNA, 20 nt, synthetic construct
  source 1..20: mol_type = other RNA
tgctagcatggaaaagccaa

SEQ ID NO: 1670 - RNA, 20 nt, synthetic construct
  source 1..20: mol_type = other RNA
tgctcaccaattacataaat

SEQ ID NO: 1671 - RNA, 20 nt, synthetic construct
  source 1..20: mol_type = other RNA
tgctggccagtaccacagca

SEQ ID NO: 1672 - RNA, 20 nt, synthetic construct
  source 1..20: mol_type = other RNA
tgctgtggtactggccagca

SEQ ID NO: 1673 - RNA, 20 nt, synthetic construct
  source 1..20: mol_type = other RNA
tgcttcggcaggctgacagc

SEQ ID NO: 1674 - RNA, 20 nt, synthetic construct
  source 1..20: mol_type = other RNA
tggaaaagccaaagggaact

SEQ ID NO: 1675 - RNA, 20 nt, synthetic construct
  source 1..20: mol_type = other RNA
tggaaatcaagtgaacctca

SEQ ID NO: 1676 - RNA, 20 nt, synthetic construct
  source 1..20: mol_type = other RNA
tggaatcatctaggaaggtc

SEQ ID NO: 1677 - RNA, 20 nt, synthetic construct
  source 1..20: mol_type = other RNA
tggacacgggactctacatc

SEQ ID NO: 1678 - RNA, 20 nt, synthetic construct
  source 1..20: mol_type = other RNA
tggagatgcatactcacaca

SEQ ID NO: 1679 - RNA, 20 nt, synthetic construct
  source 1..20: mol_type = other RNA
tggagctcatgtacccaccg

SEQ ID NO: 1680 - RNA, 20 nt, synthetic construct
  source 1..20: mol_type = other RNA
tggaggtgcccgtgcagatg

SEQ ID NO: 1681 - RNA, 20 nt, synthetic construct
  source 1..20: mol_type = other RNA
tggatagtgaggttcacttg

SEQ ID NO: 1682 - RNA, 20 nt, synthetic construct
  source 1..20: mol_type = other RNA
tggccagcagccgaggcatc

SEQ ID NO: 1683 - RNA, 20 nt, synthetic construct
  source 1..20: mol_type = other RNA
tggccagtaccacagcaggc

SEQ ID NO: 1684 - RNA, 20 nt, synthetic construct
  source 1..20: mol_type = other RNA
tggcccagcctgctgtggta

SEQ ID NO: 1685 - RNA, 20 nt, synthetic construct
  source 1..20: mol_type = other RNA
tggccctcagtccttggata

SEQ ID NO: 1686 - RNA, 20 nt, synthetic construct
  source 1..20: mol_type = other RNA
tggcgatgcctcggctgctg

SEQ ID NO: 1687 - RNA, 20 nt, synthetic construct
  source 1..20: mol_type = other RNA
tggcggtgggtacatgagct

SEQ ID NO: 1688 - RNA, 20 nt, synthetic construct
  source 1..20: mol_type = other RNA
tggctgtcagcctgccgaag

SEQ ID NO: 1689 - RNA, 20 nt, synthetic construct
  source 1..20: mol_type = other RNA
tggctttgcctggagatgca

SEQ ID NO: 1690 - RNA, 20 nt, synthetic construct
  source 1..20: mol_type = other RNA
tggctttgctcaccaattac

SEQ ID NO: 1691 - RNA, 20 nt, synthetic construct
  source 1..20: mol_type = other RNA
tggcttttccatgctagcaa

SEQ ID NO: 1692 - RNA, 20 nt, synthetic construct
  source 1..20: mol_type = other RNA
tgggcataggcaacggaacc

SEQ ID NO: 1693 - RNA, 20 nt, synthetic construct
  source 1..20: mol_type = other RNA
tgggccacgtgcattgctag

SEQ ID NO: 1694 - RNA, 20 nt, synthetic construct
  source 1..20: mol_type = other RNA
tggggaatgagttgaccttc

SEQ ID NO: 1695 - RNA, 20 nt, synthetic construct
  source 1..20: mol_type = other RNA
tgggtacatgagctccacct

SEQ ID NO: 1696 - RNA, 20 nt, synthetic construct
  source 1..20: mol_type = other RNA
tgggttccgttgcctatgcc

SEQ ID NO: 1697 - RNA, 20 nt, synthetic construct
  source 1..20: mol_type = other RNA
tggtactggccagcagccga

SEQ ID NO: 1698 - RNA, 20 nt, synthetic construct
  source 1..20: mol_type = other RNA
tggtgagcaaagccatttca

SEQ ID NO: 1699 - RNA, 20 nt, synthetic construct
  source 1..20: mol_type = other RNA
tgtaattggtgagcaaagcc

SEQ ID NO: 1700 - RNA, 20 nt, synthetic construct
  source 1..20: mol_type = other RNA
tgtacccaccgccatactac

SEQ ID NO: 1701 - RNA, 20 nt, synthetic construct
  source 1..20: mol_type = other RNA
tgtagagtcccgtgtccatg

SEQ ID NO: 1702 - RNA, 20 nt, synthetic construct
  source 1..20: mol_type = other RNA
tgtaggttgccgcacagact

SEQ ID NO: 1703 - RNA, 20 nt, synthetic construct
  source 1..20: mol_type = other RNA
tgtcaactcagtgaaatggc

SEQ ID NO: 1704 - RNA, 20 nt, synthetic construct
  source 1..20: mol_type = other RNA
tgtcacccggacctcagtgg

SEQ ID NO: 1705 - RNA, 20 nt, synthetic construct
  source 1..20: mol_type = other RNA
tgtcagcctgccgaagcact

SEQ ID NO: 1706 - RNA, 20 nt, synthetic construct
  source 1..20: mol_type = other RNA
tgtccatggccctcagtcct

SEQ ID NO: 1707 - RNA, 20 nt, synthetic construct
  source 1..20: mol_type = other RNA
tgtgagtatgcatctccagg

SEQ ID NO: 1708 - RNA, 20 nt, synthetic construct
  source 1..20: mol_type = other RNA
tgtgcggcaacctacatgat

SEQ ID NO: 1709 - RNA, 20 nt, synthetic construct
  source 1..20: mol_type = other RNA
tgtggtactggccagcagcc

SEQ ID NO: 1710 - RNA, 20 nt, synthetic construct
  source 1..20: mol_type = other RNA
tgtgtgagtatgcatctcca

SEQ ID NO: 1711 - RNA, 20 nt, synthetic construct
  source 1..20: mol_type = other RNA
tgtgtgtgagtatgcatctc

SEQ ID NO: 1712 - RNA, 20 nt, synthetic construct
  source 1..20: mol_type = other RNA
ttacataaatctgggttccg

SEQ ID NO: 1713 - RNA, 20 nt, synthetic construct
  source 1..20: mol_type = other RNA
ttatgtaattggtgagcaaa

SEQ ID NO: 1714 - RNA, 20 nt, synthetic construct
  source 1..20: mol_type = other RNA
ttcactgagttccctttggc

SEQ ID NO: 1715 - RNA, 20 nt, synthetic construct
  source 1..20: mol_type = other RNA
ttcacttgatttccactgga

SEQ ID NO: 1716 - RNA, 20 nt, synthetic construct
  source 1..20: mol_type = other RNA
ttcagtcacctggctgtcag

SEQ ID NO: 1717 - RNA, 20 nt, synthetic construct
  source 1..20: mol_type = other RNA
ttccactggaggtgcccgtg

SEQ ID NO: 1718 - RNA, 20 nt, synthetic construct
  source 1..20: mol_type = other RNA
ttccatctgcacgggcacct

SEQ ID NO: 1719 - RNA, 20 nt, synthetic construct
  source 1..20: mol_type = other RNA
ttccatgctagcaatgcacg

SEQ ID NO: 1720 - RNA, 20 nt, synthetic construct
  source 1..20: mol_type = other RNA
ttccccatcatgtaggttgc

SEQ ID NO: 1721 - RNA, 20 nt, synthetic construct
  source 1..20: mol_type = other RNA
ttccctttggcttttccatg

SEQ ID NO: 1722 - RNA, 20 nt, synthetic construct
  source 1..20: mol_type = other RNA
ttccgttgcctatgcccagg

SEQ ID NO: 1723 - RNA, 20 nt, synthetic construct
  source 1..20: mol_type = other RNA
ttcctagatgattccatctg

SEQ ID NO: 1724 - RNA, 20 nt, synthetic construct
  source 1..20: mol_type = other RNA
ttcggcaggctgacagccag

SEQ ID NO: 1725 - RNA, 20 nt, synthetic construct
  source 1..20: mol_type = other RNA
ttgaccttcctagatgattc

SEQ ID NO: 1726 - RNA, 20 nt, synthetic construct
  source 1..20: mol_type = other RNA
ttgatttccactggaggtgc

SEQ ID NO: 1727 - RNA, 20 nt, synthetic construct
  source 1..20: mol_type = other RNA
ttgcagatgtagagtcccgt

SEQ ID NO: 1728 - RNA, 20 nt, synthetic construct
  source 1..20: mol_type = other RNA
ttgccgcacagacttcagtc

SEQ ID NO: 1729 - RNA, 20 nt, synthetic construct
  source 1..20: mol_type = other RNA
ttgcctatgcccaggtagta

SEQ ID NO: 1730 - RNA, 20 nt, synthetic construct
  source 1..20: mol_type = other RNA
ttgcctggagatgcatactc

SEQ ID NO: 1731 - RNA, 20 nt, synthetic construct
  source 1..20: mol_type = other RNA
ttgctagcatggaaaagcca

SEQ ID NO: 1732 - RNA, 20 nt, synthetic construct
  source 1..20: mol_type = other RNA
ttgctcaccaattacataaa

SEQ ID NO: 1733 - RNA, 20 nt, synthetic construct
  source 1..20: mol_type = other RNA
ttggatagtgaggttcactt

SEQ ID NO: 1734 - RNA, 20 nt, synthetic construct
  source 1..20: mol_type = other RNA
ttggcttttccatgctagca

SEQ ID NO: 1735 - RNA, 20 nt, synthetic construct
  source 1..20: mol_type = other RNA
ttggtgagcaaagccatttc

SEQ ID NO: 1736 - RNA, 20 nt, synthetic construct
  source 1..20: mol_type = other RNA
ttgtgtgtgagtatgcatct

SEQ ID NO: 1737 - RNA, 20 nt, synthetic construct
  source 1..20: mol_type = other RNA
tttatgtaattggtgagcaa

SEQ ID NO: 1738 - RNA, 20 nt, synthetic construct
  source 1..20: mol_type = other RNA
tttccactggaggtgcccgt

SEQ ID NO: 1739 - RNA, 20 nt, synthetic construct
  source 1..20: mol_type = other RNA
tttccatgctagcaatgcac

SEQ ID NO: 1740 - RNA, 20 nt, synthetic construct
  source 1..20: mol_type = other RNA
tttgcctggagatgcatact

SEQ ID NO: 1741 - RNA, 20 nt, synthetic construct
  source 1..20: mol_type = other RNA
tttgctcaccaattacataa

SEQ ID NO: 1742 - RNA, 20 nt, synthetic construct
  source 1..20: mol_type = other RNA
tttggcttttccatgctagc

SEQ ID NO: 1743 - RNA, 20 nt, synthetic construct
  source 1..20: mol_type = other RNA
tttgtgtgtgagtatgcatc

SEQ ID NO: 1744 - RNA, 20 nt, synthetic construct
  source 1..20: mol_type = other RNA
ttttccatgctagcaatgca

SEQ ID NO: 1745 - RNA, 21 nt, synthetic construct
  source 1..21: mol_type = other RNA
aaaagccaaagggaactcagt

SEQ ID NO: 1746 - RNA, 21 nt, synthetic construct
  source 1..21: mol_type = other RNA
aaagccaaagggaactcagtg

SEQ ID NO: 1747 - RNA, 21 nt, synthetic construct
  source 1..21: mol_type = other RNA
aaagccactgaggtccgggtg

SEQ ID NO: 1748 - RNA, 21 nt, synthetic construct
  source 1..21: mol_type = other RNA
aaagccatttcactgagttga

SEQ ID NO: 1749 - RNA, 21 nt, synthetic construct
  source 1..21: mol_type = other RNA
aaagctggcgatgcctcggct

SEQ ID NO: 1750 - RNA, 21 nt, synthetic construct
  source 1..21: mol_type = other RNA
aaatcaagtgaacctcactat

SEQ ID NO: 1751 - RNA, 21 nt, synthetic construct
  source 1..21: mol_type = other RNA
aaatctgggttccgttgccta

SEQ ID NO: 1752 - RNA, 21 nt, synthetic construct
  source 1..21: mol_type = other RNA
aaatggctttgctcaccaatt

SEQ ID NO: 1753 - RNA, 21 nt, synthetic construct
  source 1..21: mol_type = other RNA
aacaggtgtcaactcagtgaa

SEQ ID NO: 1754 - RNA, 21 nt, synthetic construct
  source 1..21: mol_type = other RNA
aacccagatttatgtaattgg

SEQ ID NO: 1755 - RNA, 21 nt, synthetic construct
  source 1..21: mol_type = other RNA
aacctacatgatggggaatga

SEQ ID NO: 1756 - RNA, 21 nt, synthetic construct
  source 1..21: mol_type = other RNA
aacctcactatccaaggactg

SEQ ID NO: 1757 - RNA, 21 nt, synthetic construct
  source 1..21: mol_type = other RNA
aacggaacccagatttatgta

SEQ ID NO: 1758 - RNA, 21 nt, synthetic construct
  source 1..21: mol_type = other RNA
aactcagtgaaatggctttgc

SEQ ID NO: 1759 - RNA, 21 nt, synthetic construct
  source 1..21: mol_type = other RNA
aactcattccccatcatgtag

SEQ ID NO: 1760 - RNA, 21 nt, synthetic construct
  source 1..21: mol_type = other RNA
aagcactgtcacccggacctc

SEQ ID NO: 1761 - RNA, 21 nt, synthetic construct
  source 1..21: mol_type = other RNA
aagccactgaggtccgggtga

SEQ ID NO: 1762 - RNA, 21 nt, synthetic construct
  source 1..21: mol_type = other RNA
aagccatttcactgagttgac

SEQ ID NO: 1763 - RNA, 21 nt, synthetic construct
  source 1..21: mol_type = other RNA
aagctggcgatgcctcggctg

SEQ ID NO: 1764 - RNA, 21 nt, synthetic construct
  source 1..21: mol_type = other RNA
aaggactgagggccatggaca

SEQ ID NO: 1765 - RNA, 21 nt, synthetic construct
  source 1..21: mol_type = other RNA
aaggtcaactcattccccatc

SEQ ID NO: 1766 - RNA, 21 nt, synthetic construct
  source 1..21: mol_type = other RNA
aaggtggagctcatgtaccca

SEQ ID NO: 1767 - RNA, 21 nt, synthetic construct
  source 1..21: mol_type = other RNA
aagtctgtgcggcaacctaca

SEQ ID NO: 1768 - RNA, 21 nt, synthetic construct
  source 1..21: mol_type = other RNA
aagtgaacctcactatccaag

SEQ ID NO: 1769 - RNA, 21 nt, synthetic construct
  source 1..21: mol_type = other RNA
aatcaagtgaacctcactatc

SEQ ID NO: 1770 - RNA, 21 nt, synthetic construct
  source 1..21: mol_type = other RNA
aatcatctaggaaggtcaact

SEQ ID NO: 1771 - RNA, 21 nt, synthetic construct
  source 1..21: mol_type = other RNA
aatctgggttccgttgcctat

SEQ ID NO: 1772 - RNA, 21 nt, synthetic construct
  source 1..21: mol_type = other RNA
aatgagttgaccttcctagat

SEQ ID NO: 1773 - RNA, 21 nt, synthetic construct
  source 1..21: mol_type = other RNA
aatgcacgtggcccagcctgc

SEQ ID NO: 1774 - RNA, 21 nt, synthetic construct
  source 1..21: mol_type = other RNA
aatggctttgctcaccaatta

SEQ ID NO: 1775 - RNA, 21 nt, synthetic construct
  source 1..21: mol_type = other RNA
aattacataaatctgggttcc

SEQ ID NO: 1776 - RNA, 21 nt, synthetic construct
  source 1..21: mol_type = other RNA
aattggtgagcaaagccattt

SEQ ID NO: 1777 - RNA, 21 nt, synthetic construct
  source 1..21: mol_type = other RNA
acaaagctggcgatgcctcgg

SEQ ID NO: 1778 - RNA, 21 nt, synthetic construct
  source 1..21: mol_type = other RNA
acacaaagctggcgatgcctc

SEQ ID NO: 1779 - RNA, 21 nt, synthetic construct
  source 1..21: mol_type = other RNA
acacacaaagctggcgatgcc

SEQ ID NO: 1780 - RNA, 21 nt, synthetic construct
  source 1..21: mol_type = other RNA
acacgggactctacatctgca

SEQ ID NO: 1781 - RNA, 21 nt, synthetic construct
  source 1..21: mol_type = other RNA
acagacttcagtcacctggct

SEQ ID NO: 1782 - RNA, 21 nt, synthetic construct
  source 1..21: mol_type = other RNA
acagcaggctgggccacgtgc

SEQ ID NO: 1783 - RNA, 21 nt, synthetic construct
  source 1..21: mol_type = other RNA
acagccaggtgactgaagtct

SEQ ID NO: 1784 - RNA, 21 nt, synthetic construct
  source 1..21: mol_type = other RNA
acaggtgtcaactcagtgaaa

SEQ ID NO: 1785 - RNA, 21 nt, synthetic construct
  source 1..21: mol_type = other RNA
acagtgcttcggcaggctgac

SEQ ID NO: 1786 - RNA, 21 nt, synthetic construct
  source 1..21: mol_type = other RNA
acataaatctgggttccgttg

SEQ ID NO: 1787 - RNA, 21 nt, synthetic construct
  source 1..21: mol_type = other RNA
acatctgcaaggtggagctca

SEQ ID NO: 1788 - RNA, 21 nt, synthetic construct
  source 1..21: mol_type = other RNA
acatgagctccaccttgcaga

SEQ ID NO: 1789 - RNA, 21 nt, synthetic construct
  source 1..21: mol_type = other RNA
acatgatggggaatgagttga

SEQ ID NO: 1790 - RNA, 21 nt, synthetic construct
  source 1..21: mol_type = other RNA
accaattacataaatctgggt

SEQ ID NO: 1791 - RNA, 21 nt, synthetic construct
  source 1..21: mol_type = other RNA
accacagcaggctgggccacg

SEQ ID NO: 1792 - RNA, 21 nt, synthetic construct
  source 1..21: mol_type = other RNA
acccaccgccatactacctgg

SEQ ID NO: 1793 - RNA, 21 nt, synthetic construct
  source 1..21: mol_type = other RNA
acccagatttatgtaattggt

SEQ ID NO: 1794 - RNA, 21 nt, synthetic construct
  source 1..21: mol_type = other RNA
acccggacctcagtggctttg

SEQ ID NO: 1795 - RNA, 21 nt, synthetic construct
  source 1..21: mol_type = other RNA
accgccatactacctgggcat

SEQ ID NO: 1796 - RNA, 21 nt, synthetic construct
  source 1..21: mol_type = other RNA
acctacatgatggggaatgag

SEQ ID NO: 1797 - RNA, 21 nt, synthetic construct
  source 1..21: mol_type = other RNA
acctcactatccaaggactga

SEQ ID NO: 1798 - RNA, 21 nt, synthetic construct
  source 1..21: mol_type = other RNA
acctcagtggctttgcctgga

SEQ ID NO: 1799 - RNA, 21 nt, synthetic construct
  source 1..21: mol_type = other RNA
acctccagtggaaatcaagtg

SEQ ID NO: 1800 - RNA, 21 nt, synthetic construct
  source 1..21: mol_type = other RNA
acctggctgtcagcctgccga

SEQ ID NO: 1801 - RNA, 21 nt, synthetic construct
  source 1..21: mol_type = other RNA
acctgggcataggcaacggaa

SEQ ID NO: 1802 - RNA, 21 nt, synthetic construct
  source 1..21: mol_type = other RNA
accttcctagatgattccatc

SEQ ID NO: 1803 - RNA, 21 nt, synthetic construct
  source 1..21: mol_type = other RNA
accttgcagatgtagagtccc

SEQ ID NO: 1804 - RNA, 21 nt, synthetic construct
  source 1..21: mol_type = other RNA
acggaacccagatttatgtaa

SEQ ID NO: 1805 - RNA, 21 nt, synthetic construct
  source 1..21: mol_type = other RNA
acgggactctacatctgcaag

SEQ ID NO: 1806 - RNA, 21 nt, synthetic construct
  source 1..21: mol_type = other RNA
acgggcacctccagtggaaat

SEQ ID NO: 1807 - RNA, 21 nt, synthetic construct
  source 1..21: mol_type = other RNA
acgtgcattgctagcatggaa

SEQ ID NO: 1808 - RNA, 21 nt, synthetic construct
  source 1..21: mol_type = other RNA
acgtggcccagcctgctgtgg

SEQ ID NO: 1809 - RNA, 21 nt, synthetic construct
  source 1..21: mol_type = other RNA
actacctgggcataggcaacg

SEQ ID NO: 1810 - RNA, 21 nt, synthetic construct
  source 1..21: mol_type = other RNA
actatccaaggactgagggcc

SEQ ID NO: 1811 - RNA, 21 nt, synthetic construct
  source 1..21: mol_type = other RNA
actcacacacaaagctggcga

SEQ ID NO: 1812 - RNA, 21 nt, synthetic construct
  source 1..21: mol_type = other RNA
actcagtgaaatggctttgct

SEQ ID NO: 1813 - RNA, 21 nt, synthetic construct
  source 1..21: mol_type = other RNA
actcattccccatcatgtagg

SEQ ID NO: 1814 - RNA, 21 nt, synthetic construct
  source 1..21: mol_type = other RNA
actctacatctgcaaggtgga

SEQ ID NO: 1815 - RNA, 21 nt, synthetic construct
  source 1..21: mol_type = other RNA
actgaagtctgtgcggcaacc

SEQ ID NO: 1816 - RNA, 21 nt, synthetic construct
  source 1..21: mol_type = other RNA
actgagggccatggacacggg

SEQ ID NO: 1817 - RNA, 21 nt, synthetic construct
  source 1..21: mol_type = other RNA
actgaggtccgggtgacagtg

SEQ ID NO: 1818 - RNA, 21 nt, synthetic construct
  source 1..21: mol_type = other RNA
actgagttccctttggctttt

SEQ ID NO: 1819 - RNA, 21 nt, synthetic construct
  source 1..21: mol_type = other RNA
actggaggtgcccgtgcagat

SEQ ID NO: 1820 - RNA, 21 nt, synthetic construct
  source 1..21: mol_type = other RNA
actggccagcagccgaggcat

SEQ ID NO: 1821 - RNA, 21 nt, synthetic construct
  source 1..21: mol_type = other RNA
actgtcacccggacctcagtg

SEQ ID NO: 1822 - RNA, 21 nt, synthetic construct
  source 1..21: mol_type = other RNA
acttcagtcacctggctgtca

SEQ ID NO: 1823 - RNA, 21 nt, synthetic construct
  source 1..21: mol_type = other RNA
acttgatttccactggaggtg

SEQ ID NO: 1824 - RNA, 21 nt, synthetic construct
  source 1..21: mol_type = other RNA
agacttcagtcacctggctgt

SEQ ID NO: 1825 - RNA, 21 nt, synthetic construct
  source 1..21: mol_type = other RNA
agagtcccgtgtccatggccc

SEQ ID NO: 1826 - RNA, 21 nt, synthetic construct
  source 1..21: mol_type = other RNA
agatgattccatctgcacggg

SEQ ID NO: 1827 - RNA, 21 nt, synthetic construct
  source 1..21: mol_type = other RNA
agatgcatactcacacacaaa

SEQ ID NO: 1828 - RNA, 21 nt, synthetic construct
  source 1..21: mol_type = other RNA
agatggaatcatctaggaagg

SEQ ID NO: 1829 - RNA, 21 nt, synthetic construct
  source 1..21: mol_type = other RNA
agatgtagagtcccgtgtcca

SEQ ID NO: 1830 - RNA, 21 nt, synthetic construct
  source 1..21: mol_type = other RNA
agatttatgtaattggtgagc

SEQ ID NO: 1831 - RNA, 21 nt, synthetic construct
  source 1..21: mol_type = other RNA
agcaaagccatttcactgagt

SEQ ID NO: 1832 - RNA, 21 nt, synthetic construct
  source 1..21: mol_type = other RNA
agcaatgcacgtggcccagcc

SEQ ID NO: 1833 - RNA, 21 nt, synthetic construct
  source 1..21: mol_type = other RNA
agcactgtcacccggacctca

SEQ ID NO: 1834 - RNA, 21 nt, synthetic construct
  source 1..21: mol_type = other RNA
agcagccgaggcatcgccagc

SEQ ID NO: 1835 - RNA, 21 nt, synthetic construct
  source 1..21: mol_type = other RNA
agcaggctgggccacgtgcat

SEQ ID NO: 1836 - RNA, 21 nt, synthetic construct
  source 1..21: mol_type = other RNA
agcatggaaaagccaaaggga

SEQ ID NO: 1837 - RNA, 21 nt, synthetic construct
  source 1..21: mol_type = other RNA
agccactgaggtccgggtgac

SEQ ID NO: 1838 - RNA, 21 nt, synthetic construct
  source 1..21: mol_type = other RNA
agccaggtgactgaagtctgt

SEQ ID NO: 1839 - RNA, 21 nt, synthetic construct
  source 1..21: mol_type = other RNA
agccatttcactgagttgaca

SEQ ID NO: 1840 - RNA, 21 nt, synthetic construct
  source 1..21: mol_type = other RNA
agccgaggcatcgccagcttt

SEQ ID NO: 1841 - RNA, 21 nt, synthetic construct
  source 1..21: mol_type = other RNA
agcctgccgaagcactgtcac

SEQ ID NO: 1842 - RNA, 21 nt, synthetic construct
  source 1..21: mol_type = other RNA
agcctgctgtggtactggcca

SEQ ID NO: 1843 - RNA, 21 nt, synthetic construct
  source 1..21: mol_type = other RNA
agctcatgtacccaccgccat

SEQ ID NO: 1844 - RNA, 21 nt, synthetic construct
  source 1..21: mol_type = other RNA
agctccaccttgcagatgtag

SEQ ID NO: 1845 - RNA, 21 nt, synthetic construct
  source 1..21: mol_type = other RNA
agctggcgatgcctcggctgc

SEQ ID NO: 1846 - RNA, 21 nt, synthetic construct
  source 1..21: mol_type = other RNA
agctttgtgtgtgagtatgca

SEQ ID NO: 1847 - RNA, 21 nt, synthetic construct
  source 1..21: mol_type = other RNA
aggaaggtcaactcattcccc

SEQ ID NO: 1848 - RNA, 21 nt, synthetic construct
  source 1..21: mol_type = other RNA
aggactgagggccatggacac

SEQ ID NO: 1849 - RNA, 21 nt, synthetic construct
  source 1..21: mol_type = other RNA
aggcaaagccactgaggtccg

SEQ ID NO: 1850 - RNA, 21 nt, synthetic construct
  source 1..21: mol_type = other RNA
aggcaacggaacccagattta

SEQ ID NO: 1851 - RNA, 21 nt, synthetic construct
  source 1..21: mol_type = other RNA
aggcatcgccagctttgtgtg

SEQ ID NO: 1852 - RNA, 21 nt, synthetic construct
  source 1..21: mol_type = other RNA
aggctgacagccaggtgactg

SEQ ID NO: 1853 - RNA, 21 nt, synthetic construct
  source 1..21: mol_type = other RNA
aggctgggccacgtgcattgc

SEQ ID NO: 1854 - RNA, 21 nt, synthetic construct
  source 1..21: mol_type = other RNA
agggccatggacacgggactc

SEQ ID NO: 1855 - RNA, 21 nt, synthetic construct
  source 1..21: mol_type = other RNA
aggtagtatggcggtgggtac

SEQ ID NO: 1856 - RNA, 21 nt, synthetic construct
  source 1..21: mol_type = other RNA
aggtcaactcattccccatca

SEQ ID NO: 1857 - RNA, 21 nt, synthetic construct
  source 1..21: mol_type = other RNA
aggtccgggtgacagtgcttc

SEQ ID NO: 1858 - RNA, 21 nt, synthetic construct
  source 1..21: mol_type = other RNA
aggtgactgaagtctgtgcgg

SEQ ID NO: 1859 - RNA, 21 nt, synthetic construct
  source 1..21: mol_type = other RNA
aggtgcccgtgcagatggaat

SEQ ID NO: 1860 - RNA, 21 nt, synthetic construct
  source 1..21: mol_type = other RNA
aggtggagctcatgtacccac

SEQ ID NO: 1861 - RNA, 21 nt, synthetic construct
  source 1..21: mol_type = other RNA
aggtgtcaactcagtgaaatg

SEQ ID NO: 1862 - RNA, 21 nt, synthetic construct
  source 1..21: mol_type = other RNA
aggttcacttgatttccactg

SEQ ID NO: 1863 - RNA, 21 nt, synthetic construct
  source 1..21: mol_type = other RNA
aggttgccgcacagacttcag

SEQ ID NO: 1864 - RNA, 21 nt, synthetic construct
  source 1..21: mol_type = other RNA
agtaccacagcaggctgggcc

SEQ ID NO: 1865 - RNA, 21 nt, synthetic construct
  source 1..21: mol_type = other RNA
agtatgcatctccaggcaaag

SEQ ID NO: 1866 - RNA, 21 nt, synthetic construct
  source 1..21: mol_type = other RNA
agtatggcggtgggtacatga

SEQ ID NO: 1867 - RNA, 21 nt, synthetic construct
  source 1..21: mol_type = other RNA
agtcacctggctgtcagcctg

SEQ ID NO: 1868 - RNA, 21 nt, synthetic construct
  source 1..21: mol_type = other RNA
agtcccgtgtccatggccctc

SEQ ID NO: 1869 - RNA, 21 nt, synthetic construct
  source 1..21: mol_type = other RNA
agtccttggatagtgaggttc

SEQ ID NO: 1870 - RNA, 21 nt, synthetic construct
  source 1..21: mol_type = other RNA
agtctgtgcggcaacctacat

SEQ ID NO: 1871 - RNA, 21 nt, synthetic construct
  source 1..21: mol_type = other RNA
agtgaaatggctttgctcacc

SEQ ID NO: 1872 - RNA, 21 nt, synthetic construct
  source 1..21: mol_type = other RNA
agtgaacctcactatccaagg

SEQ ID NO: 1873 - RNA, 21 nt, synthetic construct
  source 1..21: mol_type = other RNA
agtgaggttcacttgatttcc

SEQ ID NO: 1874 - RNA, 21 nt, synthetic construct
  source 1..21: mol_type = other RNA
agtgcttcggcaggctgacag

SEQ ID NO: 1875 - RNA, 21 nt, synthetic construct
  source 1..21: mol_type = other RNA
agtggaaatcaagtgaacctc

SEQ ID NO: 1876 - RNA, 21 nt, synthetic construct
  source 1..21: mol_type = other RNA
agtggctttgcctggagatgc

SEQ ID NO: 1877 - RNA, 21 nt, synthetic construct
  source 1..21: mol_type = other RNA
agttcactgagttccctttgg

SEQ ID NO: 1878 - RNA, 21 nt, synthetic construct
  source 1..21: mol_type = other RNA
agttccctttggcttttccat

SEQ ID NO: 1879 - RNA, 21 nt, synthetic construct
  source 1..21: mol_type = other RNA
agttgaccttcctagatgatt

SEQ ID NO: 1880 - RNA, 21 nt, synthetic construct
  source 1..21: mol_type = other RNA
ataaatctgggttccgttgcc

SEQ ID NO: 1881 - RNA, 21 nt, synthetic construct
  source 1..21: mol_type = other RNA
atactacctgggcataggcaa

SEQ ID NO: 1882 - RNA, 21 nt, synthetic construct
  source 1..21: mol_type = other RNA
atactcacacacaaagctggc

SEQ ID NO: 1883 - RNA, 21 nt, synthetic construct
  source 1..21: mol_type = other RNA
ataggcaacggaacccagatt

SEQ ID NO: 1884 - RNA, 21 nt, synthetic construct
  source 1..21: mol_type = other RNA
atagtgaggttcacttgattt

SEQ ID NO: 1885 - RNA, 21 nt, synthetic construct
  source 1..21: mol_type = other RNA
atcaagtgaacctcactatcc

SEQ ID NO: 1886 - RNA, 21 nt, synthetic construct
  source 1..21: mol_type = other RNA
atcatctaggaaggtcaactc

SEQ ID NO: 1887 - RNA, 21 nt, synthetic construct
  source 1..21: mol_type = other RNA
atcatgtaggttgccgcacag

SEQ ID NO: 1888 - RNA, 21 nt, synthetic construct
  source 1..21: mol_type = other RNA
atccaaggactgagggccatg

SEQ ID NO: 1889 - RNA, 21 nt, synthetic construct
  source 1..21: mol_type = other RNA
atcgccagctttgtgtgtgag

SEQ ID NO: 1890 - RNA, 21 nt, synthetic construct
  source 1..21: mol_type = other RNA
atctaggaaggtcaactcatt

SEQ ID NO: 1891 - RNA, 21 nt, synthetic construct
  source 1..21: mol_type = other RNA
atctccaggcaaagccactga

SEQ ID NO: 1892 - RNA, 21 nt, synthetic construct
  source 1..21: mol_type = other RNA
atctgcaaggtggagctcatg

SEQ ID NO: 1893 - RNA, 21 nt, synthetic construct
  source 1..21: mol_type = other RNA
atctgcacgggcacctccagt

SEQ ID NO: 1894 - RNA, 21 nt, synthetic construct
  source 1..21: mol_type = other RNA
atctgggttccgttgcctatg

SEQ ID NO: 1895 - RNA, 21 nt, synthetic construct
  source 1..21: mol_type = other RNA
atgagctccaccttgcagatg

SEQ ID NO: 1896 - RNA, 21 nt, synthetic construct
  source 1..21: mol_type = other RNA
atgagttcactgagttccctt

SEQ ID NO: 1897 - RNA, 21 nt, synthetic construct
  source 1..21: mol_type = other RNA
atgagttgaccttcctagatg

SEQ ID NO: 1898 - RNA, 21 nt, synthetic construct
  source 1..21: mol_type = other RNA
atgatggggaatgagttgacc

SEQ ID NO: 1899 - RNA, 21 nt, synthetic construct
  source 1..21: mol_type = other RNA
atgattccatctgcacgggca

SEQ ID NO: 1900 - RNA, 21 nt, synthetic construct
  source 1..21: mol_type = other RNA
atgcacgtggcccagcctgct

SEQ ID NO: 1901 - RNA, 21 nt, synthetic construct
  source 1..21: mol_type = other RNA
atgcatactcacacacaaagc

SEQ ID NO: 1902 - RNA, 21 nt, synthetic construct
  source 1..21: mol_type = other RNA
atgcatctccaggcaaagcca

SEQ ID NO: 1903 - RNA, 21 nt, synthetic construct
  source 1..21: mol_type = other RNA
atgcccaggtagtatggcggt

SEQ ID NO: 1904 - RNA, 21 nt, synthetic construct
  source 1..21: mol_type = other RNA
atgcctcggctgctggccagt

SEQ ID NO: 1905 - RNA, 21 nt, synthetic construct
  source 1..21: mol_type = other RNA
atgctagcaatgcacgtggcc

SEQ ID NO: 1906 - RNA, 21 nt, synthetic construct
  source 1..21: mol_type = other RNA
atggaaaagccaaagggaact

SEQ ID NO: 1907 - RNA, 21 nt, synthetic construct
  source 1..21: mol_type = other RNA
atggaatcatctaggaaggtc

SEQ ID NO: 1908 - RNA, 21 nt, synthetic construct
  source 1..21: mol_type = other RNA
atggacacgggactctacatc

SEQ ID NO: 1909 - RNA, 21 nt, synthetic construct
  source 1..21: mol_type = other RNA
atggccctcagtccttggata

SEQ ID NO: 1910 - RNA, 21 nt, synthetic construct
  source 1..21: mol_type = other RNA
atggcggtgggtacatgagct

SEQ ID NO: 1911 - RNA, 21 nt, synthetic construct
  source 1..21: mol_type = other RNA
atggctttgctcaccaattac

SEQ ID NO: 1912 - RNA, 21 nt, synthetic construct
  source 1..21: mol_type = other RNA
atggggaatgagttgaccttc

SEQ ID NO: 1913 - RNA, 21 nt, synthetic construct
  source 1..21: mol_type = other RNA
atgtaattggtgagcaaagcc

SEQ ID NO: 1914 - RNA, 21 nt, synthetic construct
  source 1..21: mol_type = other RNA
atgtacccaccgccatactac

SEQ ID NO: 1915 - RNA, 21 nt, synthetic construct
  source 1..21: mol_type = other RNA
atgtagagtcccgtgtccatg

SEQ ID NO: 1916 - RNA, 21 nt, synthetic construct
  source 1..21: mol_type = other RNA
atgtaggttgccgcacagact

SEQ ID NO: 1917 - RNA, 21 nt, synthetic construct
  source 1..21: mol_type = other RNA
attacataaatctgggttccg

SEQ ID NO: 1918 - RNA, 21 nt, synthetic construct
  source 1..21: mol_type = other RNA
attccatctgcacgggcacct

SEQ ID NO: 1919 - RNA, 21 nt, synthetic construct
  source 1..21: mol_type = other RNA
attccccatcatgtaggttgc

SEQ ID NO: 1920 - RNA, 21 nt, synthetic construct
  source 1..21: mol_type = other RNA
attgctagcatggaaaagcca

SEQ ID NO: 1921 - RNA, 21 nt, synthetic construct
  source 1..21: mol_type = other RNA
attggtgagcaaagccatttc

SEQ ID NO: 1922 - RNA, 21 nt, synthetic construct
  source 1..21: mol_type = other RNA
atttatgtaattggtgagcaa

SEQ ID NO: 1923 - RNA, 21 nt, synthetic construct
  source 1..21: mol_type = other RNA
atttccactggaggtgcccgt

SEQ ID NO: 1924 - RNA, 21 nt, synthetic construct
  source 1..21: mol_type = other RNA
caaagccactgaggtccgggt

SEQ ID NO: 1925 - RNA, 21 nt, synthetic construct
  source 1..21: mol_type = other RNA
caaagccatttcactgagttg

SEQ ID NO: 1926 - RNA, 21 nt, synthetic construct
  source 1..21: mol_type = other RNA
caaagctggcgatgcctcggc

SEQ ID NO: 1927 - RNA, 21 nt, synthetic construct
  source 1..21: mol_type = other RNA
caacaggtgtcaactcagtga

SEQ ID NO: 1928 - RNA, 21 nt, synthetic construct
  source 1..21: mol_type = other RNA
caacctacatgatggggaatg

SEQ ID NO: 1929 - RNA, 21 nt, synthetic construct
  source 1..21: mol_type = other RNA
caacggaacccagatttatgt

SEQ ID NO: 1930 - RNA, 21 nt, synthetic construct
  source 1..21: mol_type = other RNA
caactcagtgaaatggctttg

SEQ ID NO: 1931 - RNA, 21 nt, synthetic construct
  source 1..21: mol_type = other RNA
caactcattccccatcatgta

SEQ ID NO: 1932 - RNA, 21 nt, synthetic construct
  source 1..21: mol_type = other RNA
caaggactgagggccatggac

SEQ ID NO: 1933 - RNA, 21 nt, synthetic construct
  source 1..21: mol_type = other RNA
caaggtggagctcatgtaccc

SEQ ID NO: 1934 - RNA, 21 nt, synthetic construct
  source 1..21: mol_type = other RNA
caagtgaacctcactatccaa

SEQ ID NO: 1935 - RNA, 21 nt, synthetic construct
  source 1..21: mol_type = other RNA
caatgcacgtggcccagcctg

SEQ ID NO: 1936 - RNA, 21 nt, synthetic construct
  source 1..21: mol_type = other RNA
caattacataaatctgggttc

SEQ ID NO: 1937 - RNA, 21 nt, synthetic construct
  source 1..21: mol_type = other RNA
cacaaagctggcgatgcctcg

SEQ ID NO: 1938 - RNA, 21 nt, synthetic construct
  source 1..21: mol_type = other RNA
cacacaaagctggcgatgcct

SEQ ID NO: 1939 - RNA, 21 nt, synthetic construct
  source 1..21: mol_type = other RNA
cacacacaaagctggcgatgc

SEQ ID NO: 1940 - RNA, 21 nt, synthetic construct
  source 1..21: mol_type = other RNA
cacagacttcagtcacctggc

SEQ ID NO: 1941 - RNA, 21 nt, synthetic construct
  source 1..21: mol_type = other RNA
cacagcaggctgggccacgtg

SEQ ID NO: 1942 - RNA, 21 nt, synthetic construct
  source 1..21: mol_type = other RNA
caccaattacataaatctggg

SEQ ID NO: 1943 - RNA, 21 nt, synthetic construct
  source 1..21: mol_type = other RNA
cacccggacctcagtggcttt

SEQ ID NO: 1944 - RNA, 21 nt, synthetic construct
  source 1..21: mol_type = other RNA
caccgccatactacctgggca

SEQ ID NO: 1945 - RNA, 21 nt, synthetic construct
  source 1..21: mol_type = other RNA
cacctccagtggaaatcaagt

SEQ ID NO: 1946 - RNA, 21 nt, synthetic construct
  source 1..21: mol_type = other RNA
cacctggctgtcagcctgccg

SEQ ID NO: 1947 - RNA, 21 nt, synthetic construct
  source 1..21: mol_type = other RNA
caccttgcagatgtagagtcc

SEQ ID NO: 1948 - RNA, 21 nt, synthetic construct
  source 1..21: mol_type = other RNA
cacgggactctacatctgcaa

SEQ ID NO: 1949 - RNA, 21 nt, synthetic construct
  source 1..21: mol_type = other RNA
cacgggcacctccagtggaaa

SEQ ID NO: 1950 - RNA, 21 nt, synthetic construct
  source 1..21: mol_type = other RNA
cacgtgcattgctagcatgga

SEQ ID NO: 1951 - RNA, 21 nt, synthetic construct
  source 1..21: mol_type = other RNA
cacgtggcccagcctgctgtg

SEQ ID NO: 1952 - RNA, 21 nt, synthetic construct
  source 1..21: mol_type = other RNA
cactatccaaggactgagggc

SEQ ID NO: 1953 - RNA, 21 nt, synthetic construct
  source 1..21: mol_type = other RNA
cactgaggtccgggtgacagt

SEQ ID NO: 1954 - RNA, 21 nt, synthetic construct
  source 1..21: mol_type = other RNA
cactgagttccctttggcttt

SEQ ID NO: 1955 - RNA, 21 nt, synthetic construct
  source 1..21: mol_type = other RNA
cactggaggtgcccgtgcaga

SEQ ID NO: 1956 - RNA, 21 nt, synthetic construct
  source 1..21: mol_type = other RNA
cactgtcacccggacctcagt

SEQ ID NO: 1957 - RNA, 21 nt, synthetic construct
  source 1..21: mol_type = other RNA
cacttgatttccactggaggt

SEQ ID NO: 1958 - RNA, 21 nt, synthetic construct
  source 1..21: mol_type = other RNA
cagacttcagtcacctggctg

SEQ ID NO: 1959 - RNA, 21 nt, synthetic construct
  source 1..21: mol_type = other RNA
cagatggaatcatctaggaag

SEQ ID NO: 1960 - RNA, 21 nt, synthetic construct
  source 1..21: mol_type = other RNA
cagatgtagagtcccgtgtcc

SEQ ID NO: 1961 - RNA, 21 nt, synthetic construct
  source 1..21: mol_type = other RNA
cagatttatgtaattggtgag

SEQ ID NO: 1962 - RNA, 21 nt, synthetic construct
  source 1..21: mol_type = other RNA
cagcagccgaggcatcgccag

SEQ ID NO: 1963 - RNA, 21 nt, synthetic construct
  source 1..21: mol_type = other RNA
cagcaggctgggccacgtgca

SEQ ID NO: 1964 - RNA, 21 nt, synthetic construct
  source 1..21: mol_type = other RNA
cagccaggtgactgaagtctg

SEQ ID NO: 1965 - RNA, 21 nt, synthetic construct
  source 1..21: mol_type = other RNA
cagccgaggcatcgccagctt

SEQ ID NO: 1966 - RNA, 21 nt, synthetic construct
  source 1..21: mol_type = other RNA
cagcctgccgaagcactgtca

SEQ ID NO: 1967 - RNA, 21 nt, synthetic construct
  source 1..21: mol_type = other RNA
cagcctgctgtggtactggcc

SEQ ID NO: 1968 - RNA, 21 nt, synthetic construct
  source 1..21: mol_type = other RNA
cagctttgtgtgtgagtatgc

SEQ ID NO: 1969 - RNA, 21 nt, synthetic construct
  source 1..21: mol_type = other RNA
caggcaaagccactgaggtcc

SEQ ID NO: 1970 - RNA, 21 nt, synthetic construct
  source 1..21: mol_type = other RNA
caggctgacagccaggtgact

SEQ ID NO: 1971 - RNA, 21 nt, synthetic construct
  source 1..21: mol_type = other RNA
caggctgggccacgtgcattg

SEQ ID NO: 1972 - RNA, 21 nt, synthetic construct
  source 1..21: mol_type = other RNA
caggtagtatggcggtgggta

SEQ ID NO: 1973 - RNA, 21 nt, synthetic construct
  source 1..21: mol_type = other RNA
caggtgactgaagtctgtgcg

SEQ ID NO: 1974 - RNA, 21 nt, synthetic construct
  source 1..21: mol_type = other RNA
caggtgtcaactcagtgaaat

SEQ ID NO: 1975 - RNA, 21 nt, synthetic construct
  source 1..21: mol_type = other RNA
cagtaccacagcaggctgggc

SEQ ID NO: 1976 - RNA, 21 nt, synthetic construct
  source 1..21: mol_type = other RNA
cagtcacctggctgtcagcct

SEQ ID NO: 1977 - RNA, 21 nt, synthetic construct
  source 1..21: mol_type = other RNA
cagtccttggatagtgaggtt

SEQ ID NO: 1978 - RNA, 21 nt, synthetic construct
  source 1..21: mol_type = other RNA
cagtgaaatggctttgctcac

SEQ ID NO: 1979 - RNA, 21 nt, synthetic construct
  source 1..21: mol_type = other RNA
cagtgcttcggcaggctgaca

SEQ ID NO: 1980 - RNA, 21 nt, synthetic construct
  source 1..21: mol_type = other RNA
cagtggaaatcaagtgaacct

SEQ ID NO: 1981 - RNA, 21 nt, synthetic construct
  source 1..21: mol_type = other RNA
cagtggctttgcctggagatg

SEQ ID NO: 1982 - RNA, 21 nt, synthetic construct
  source 1..21: mol_type = other RNA
cataaatctgggttccgttgc

SEQ ID NO: 1983 - RNA, 21 nt, synthetic construct
  source 1..21: mol_type = other RNA
catactacctgggcataggca

SEQ ID NO: 1984 - RNA, 21 nt, synthetic construct
  source 1..21: mol_type = other RNA
catactcacacacaaagctgg

SEQ ID NO: 1985 - RNA, 21 nt, synthetic construct
  source 1..21: mol_type = other RNA
cataggcaacggaacccagat

SEQ ID NO: 1986 - RNA, 21 nt, synthetic construct
  source 1..21: mol_type = other RNA
catcatgtaggttgccgcaca

SEQ ID NO: 1987 - RNA, 21 nt, synthetic construct
  source 1..21: mol_type = other RNA
catcgccagctttgtgtgtga

SEQ ID NO: 1988 - RNA, 21 nt, synthetic construct
  source 1..21: mol_type = other RNA
catctaggaaggtcaactcat

SEQ ID NO: 1989 - RNA, 21 nt, synthetic construct
  source 1..21: mol_type = other RNA
catctccaggcaaagccactg

SEQ ID NO: 1990 - RNA, 21 nt, synthetic construct
  source 1..21: mol_type = other RNA
catctgcaaggtggagctcat

SEQ ID NO: 1991 - RNA, 21 nt, synthetic construct
  source 1..21: mol_type = other RNA
catctgcacgggcacctccag

SEQ ID NO: 1992 - RNA, 21 nt, synthetic construct
  source 1..21: mol_type = other RNA
catgagctccaccttgcagat

SEQ ID NO: 1993 - RNA, 21 nt, synthetic construct
  source 1..21: mol_type = other RNA
catgagttcactgagttccct

SEQ ID NO: 1994 - RNA, 21 nt, synthetic construct
  source 1..21: mol_type = other RNA
catgatggggaatgagttgac

SEQ ID NO: 1995 - RNA, 21 nt, synthetic construct
  source 1..21: mol_type = other RNA
catgctagcaatgcacgtggc

SEQ ID NO: 1996 - RNA, 21 nt, synthetic construct
  source 1..21: mol_type = other RNA
catggaaaagccaaagggaac

SEQ ID NO: 1997 - RNA, 21 nt, synthetic construct
  source 1..21: mol_type = other RNA
catggacacgggactctacat

SEQ ID NO: 1998 - RNA, 21 nt, synthetic construct
  source 1..21: mol_type = other RNA
catggccctcagtccttggat

SEQ ID NO: 1999 - RNA, 21 nt, synthetic construct
  source 1..21: mol_type = other RNA
catgtacccaccgccatacta

SEQ ID NO: 2000 - RNA, 21 nt, synthetic construct
  source 1..21: mol_type = other RNA
catgtaggttgccgcacagac

SEQ ID NO: 2001 - RNA, 21 nt, synthetic construct
  source 1..21: mol_type = other RNA
cattccccatcatgtaggttg

SEQ ID NO: 2002 - RNA, 21 nt, synthetic construct
  source 1..21: mol_type = other RNA
cattgctagcatggaaaagcc

SEQ ID NO: 2003 - RNA, 21 nt, synthetic construct
  source 1..21: mol_type = other RNA
ccaaggactgagggccatgga

SEQ ID NO: 2004 - RNA, 21 nt, synthetic construct
  source 1..21: mol_type = other RNA
ccaattacataaatctgggtt

SEQ ID NO: 2005 - RNA, 21 nt, synthetic construct
  source 1..21: mol_type = other RNA
ccacagcaggctgggccacgt

SEQ ID NO: 2006 - RNA, 21 nt, synthetic construct
  source 1..21: mol_type = other RNA
ccaccgccatactacctgggc

SEQ ID NO: 2007 - RNA, 21 nt, synthetic construct
  source 1..21: mol_type = other RNA
ccaccttgcagatgtagagtc

SEQ ID NO: 2008 - RNA, 21 nt, synthetic construct
  source 1..21: mol_type = other RNA
ccacgtgcattgctagcatgg

SEQ ID NO: 2009 - RNA, 21 nt, synthetic construct
  source 1..21: mol_type = other RNA
ccactgaggtccgggtgacag

SEQ ID NO: 2010 - RNA, 21 nt, synthetic construct
  source 1..21: mol_type = other RNA
ccactggaggtgcccgtgcag

SEQ ID NO: 2011 - RNA, 21 nt, synthetic construct
  source 1..21: mol_type = other RNA
ccagatttatgtaattggtga

SEQ ID NO: 2012 - RNA, 21 nt, synthetic construct
  source 1..21: mol_type = other RNA
ccagcagccgaggcatcgcca

SEQ ID NO: 2013 - RNA, 21 nt, synthetic construct
  source 1..21: mol_type = other RNA
ccagcctgctgtggtactggc

SEQ ID NO: 2014 - RNA, 21 nt, synthetic construct
  source 1..21: mol_type = other RNA
ccagctttgtgtgtgagtatg

SEQ ID NO: 2015 - RNA, 21 nt, synthetic construct
  source 1..21: mol_type = other RNA
ccaggcaaagccactgaggtc

SEQ ID NO: 2016 - RNA, 21 nt, synthetic construct
  source 1..21: mol_type = other RNA
ccaggtagtatggcggtgggt

SEQ ID NO: 2017 - RNA, 21 nt, synthetic construct
  source 1..21: mol_type = other RNA
ccaggtgactgaagtctgtgc

SEQ ID NO: 2018 - RNA, 21 nt, synthetic construct
  source 1..21: mol_type = other RNA
ccagtaccacagcaggctggg

SEQ ID NO: 2019 - RNA, 21 nt, synthetic construct
  source 1..21: mol_type = other RNA
ccagtggaaatcaagtgaacc

SEQ ID NO: 2020 - RNA, 21 nt, synthetic construct
  source 1..21: mol_type = other RNA
ccatactacctgggcataggc

SEQ ID NO: 2021 - RNA, 21 nt, synthetic construct
  source 1..21: mol_type = other RNA
ccatcatgtaggttgccgcac

SEQ ID NO: 2022 - RNA, 21 nt, synthetic construct
  source 1..21: mol_type = other RNA
ccatctgcacgggcacctcca

SEQ ID NO: 2023 - RNA, 21 nt, synthetic construct
  source 1..21: mol_type = other RNA
ccatgctagcaatgcacgtgg

SEQ ID NO: 2024 - RNA, 21 nt, synthetic construct
  source 1..21: mol_type = other RNA
ccatggacacgggactctaca

SEQ ID NO: 2025 - RNA, 21 nt, synthetic construct
  source 1..21: mol_type = other RNA
ccatggccctcagtccttgga

SEQ ID NO: 2026 - RNA, 21 nt, synthetic construct
  source 1..21: mol_type = other RNA
cccaccgccatactacctggg

SEQ ID NO: 2027 - RNA, 21 nt, synthetic construct
  source 1..21: mol_type = other RNA
cccagatttatgtaattggtg

SEQ ID NO: 2028 - RNA, 21 nt, synthetic construct
  source 1..21: mol_type = other RNA
cccagcctgctgtggtactgg

SEQ ID NO: 2029 - RNA, 21 nt, synthetic construct
  source 1..21: mol_type = other RNA
cccaggtagtatggcggtggg

SEQ ID NO: 2030 - RNA, 21 nt, synthetic construct
  source 1..21: mol_type = other RNA
cccatcatgtaggttgccgca

SEQ ID NO: 2031 - RNA, 21 nt, synthetic construct
  source 1..21: mol_type = other RNA
ccccatcatgtaggttgccgc

SEQ ID NO: 2032 - RNA, 21 nt, synthetic construct
  source 1..21: mol_type = other RNA
cccggacctcagtggctttgc

SEQ ID NO: 2033 - RNA, 21 nt, synthetic construct
  source 1..21: mol_type = other RNA
cccgtgcagatggaatcatct

SEQ ID NO: 2034 - RNA, 21 nt, synthetic construct
  source 1..21: mol_type = other RNA
cccgtgtccatggccctcagt

SEQ ID NO: 2035 - RNA, 21 nt, synthetic construct
  source 1..21: mol_type = other RNA
ccctcagtccttggatagtga

SEQ ID NO: 2036 - RNA, 21 nt, synthetic construct
  source 1..21: mol_type = other RNA
ccctttggcttttccatgcta

SEQ ID NO: 2037 - RNA, 21 nt, synthetic construct
  source 1..21: mol_type = other RNA
ccgaagcactgtcacccggac

SEQ ID NO: 2038 - RNA, 21 nt, synthetic construct
  source 1..21: mol_type = other RNA
ccgaggcatcgccagctttgt

SEQ ID NO: 2039 - RNA, 21 nt, synthetic construct
  source 1..21: mol_type = other RNA
ccgcacagacttcagtcacct

SEQ ID NO: 2040 - RNA, 21 nt, synthetic construct
  source 1..21: mol_type = other RNA
ccgccatactacctgggcata

SEQ ID NO: 2041 - RNA, 21 nt, synthetic construct
  source 1..21: mol_type = other RNA
ccggacctcagtggctttgcc

SEQ ID NO: 2042 - RNA, 21 nt, synthetic construct
  source 1..21: mol_type = other RNA
ccgggtgacagtgcttcggca

SEQ ID NO: 2043 - RNA, 21 nt, synthetic construct
  source 1..21: mol_type = other RNA
ccgtgcagatggaatcatcta

SEQ ID NO: 2044 - RNA, 21 nt, synthetic construct
  source 1..21: mol_type = other RNA
ccgtgtccatggccctcagtc

SEQ ID NO: 2045 - RNA, 21 nt, synthetic construct
  source 1..21: mol_type = other RNA
ccgttgcctatgcccaggtag

SEQ ID NO: 2046 - RNA, 21 nt, synthetic construct
  source 1..21: mol_type = other RNA
cctacatgatggggaatgagt

SEQ ID NO: 2047 - RNA, 21 nt, synthetic construct
  source 1..21: mol_type = other RNA
cctagatgattccatctgcac

SEQ ID NO: 2048 - RNA, 21 nt, synthetic construct
  source 1..21: mol_type = other RNA
cctatgcccaggtagtatggc

SEQ ID NO: 2049 - RNA, 21 nt, synthetic construct
  source 1..21: mol_type = other RNA
cctcactatccaaggactgag

SEQ ID NO: 2050 - RNA, 21 nt, synthetic construct
  source 1..21: mol_type = other RNA
cctcagtccttggatagtgag

SEQ ID NO: 2051 - RNA, 21 nt, synthetic construct
  source 1..21: mol_type = other RNA
cctcagtggctttgcctggag

SEQ ID NO: 2052 - RNA, 21 nt, synthetic construct
  source 1..21: mol_type = other RNA
cctccagtggaaatcaagtga

SEQ ID NO: 2053 - RNA, 21 nt, synthetic construct
  source 1..21: mol_type = other RNA
cctcggctgctggccagtacc

SEQ ID NO: 2054 - RNA, 21 nt, synthetic construct
  source 1..21: mol_type = other RNA
cctgccgaagcactgtcaccc

SEQ ID NO: 2055 - RNA, 21 nt, synthetic construct
  source 1..21: mol_type = other RNA
cctgctgtggtactggccagc

SEQ ID NO: 2056 - RNA, 21 nt, synthetic construct
  source 1..21: mol_type = other RNA
cctggagatgcatactcacac

SEQ ID NO: 2057 - RNA, 21 nt, synthetic construct
  source 1..21: mol_type = other RNA
cctggctgtcagcctgccgaa

SEQ ID NO: 2058 - RNA, 21 nt, synthetic construct
  source 1..21: mol_type = other RNA
cctgggcataggcaacggaac

SEQ ID NO: 2059 - RNA, 21 nt, synthetic construct
  source 1..21: mol_type = other RNA
ccttcctagatgattccatct

SEQ ID NO: 2060 - RNA, 21 nt, synthetic construct
  source 1..21: mol_type = other RNA
ccttgcagatgtagagtcccg

SEQ ID NO: 2061 - RNA, 21 nt, synthetic construct
  source 1..21: mol_type = other RNA
ccttggatagtgaggttcact

SEQ ID NO: 2062 - RNA, 21 nt, synthetic construct
  source 1..21: mol_type = other RNA
cctttggcttttccatgctag

SEQ ID NO: 2063 - RNA, 21 nt, synthetic construct
  source 1..21: mol_type = other RNA
cgaagcactgtcacccggacc

SEQ ID NO: 2064 - RNA, 21 nt, synthetic construct
  source 1..21: mol_type = other RNA
cgaggcatcgccagctttgtg

SEQ ID NO: 2065 - RNA, 21 nt, synthetic construct
  source 1..21: mol_type = other RNA
cgatgcctcggctgctggcca

SEQ ID NO: 2066 - RNA, 21 nt, synthetic construct
  source 1..21: mol_type = other RNA
cgcacagacttcagtcacctg

SEQ ID NO: 2067 - RNA, 21 nt, synthetic construct
  source 1..21: mol_type = other RNA
cgccagctttgtgtgtgagta

SEQ ID NO: 2068 - RNA, 21 nt, synthetic construct
  source 1..21: mol_type = other RNA
cgccatactacctgggcatag

SEQ ID NO: 2069 - RNA, 21 nt, synthetic construct
  source 1..21: mol_type = other RNA
cggaacccagatttatgtaat

SEQ ID NO: 2070 - RNA, 21 nt, synthetic construct
  source 1..21: mol_type = other RNA
cggacctcagtggctttgcct

SEQ ID NO: 2071 - RNA, 21 nt, synthetic construct
  source 1..21: mol_type = other RNA
cggcaacctacatgatgggga

SEQ ID NO: 2072 - RNA, 21 nt, synthetic construct
  source 1..21: mol_type = other RNA
cggcaggctgacagccaggtg

SEQ ID NO: 2073 - RNA, 21 nt, synthetic construct
  source 1..21: mol_type = other RNA
cggctgctggccagtaccaca

SEQ ID NO: 2074 - RNA, 21 nt, synthetic construct
  source 1..21: mol_type = other RNA
cgggactctacatctgcaagg

SEQ ID NO: 2075 - RNA, 21 nt, synthetic construct
  source 1..21: mol_type = other RNA
cgggcacctccagtggaaatc

SEQ ID NO: 2076 - RNA, 21 nt, synthetic construct
  source 1..21: mol_type = other RNA
cgggtgacagtgcttcggcag

SEQ ID NO: 2077 - RNA, 21 nt, synthetic construct
  source 1..21: mol_type = other RNA
cggtgggtacatgagctccac

SEQ ID NO: 2078 - RNA, 21 nt, synthetic construct
  source 1..21: mol_type = other RNA
cgtgcagatggaatcatctag

SEQ ID NO: 2079 - RNA, 21 nt, synthetic construct
  source 1..21: mol_type = other RNA
cgtgcattgctagcatggaaa

SEQ ID NO: 2080 - RNA, 21 nt, synthetic construct
  source 1..21: mol_type = other RNA
cgtggcccagcctgctgtggt

SEQ ID NO: 2081 - RNA, 21 nt, synthetic construct
  source 1..21: mol_type = other RNA
cgtgtccatggccctcagtcc

SEQ ID NO: 2082 - RNA, 21 nt, synthetic construct
  source 1..21: mol_type = other RNA
cgttgcctatgcccaggtagt

SEQ ID NO: 2083 - RNA, 21 nt, synthetic construct
  source 1..21: mol_type = other RNA
ctacatctgcaaggtggagct

SEQ ID NO: 2084 - RNA, 21 nt, synthetic construct
  source 1..21: mol_type = other RNA
ctacatgatggggaatgagtt

SEQ ID NO: 2085 - RNA, 21 nt, synthetic construct
  source 1..21: mol_type = other RNA
ctacctgggcataggcaacgg

SEQ ID NO: 2086 - RNA, 21 nt, synthetic construct
  source 1..21: mol_type = other RNA
ctagatgattccatctgcacg

SEQ ID NO: 2087 - RNA, 21 nt, synthetic construct
  source 1..21: mol_type = other RNA
ctagcaatgcacgtggcccag

SEQ ID NO: 2088 - RNA, 21 nt, synthetic construct
  source 1..21: mol_type = other RNA
ctagcatggaaaagccaaagg

SEQ ID NO: 2089 - RNA, 21 nt, synthetic construct
  source 1..21: mol_type = other RNA
ctaggaaggtcaactcattcc

SEQ ID NO: 2090 - RNA, 21 nt, synthetic construct
  source 1..21: mol_type = other RNA
ctatccaaggactgagggcca

SEQ ID NO: 2091 - RNA, 21 nt, synthetic construct
  source 1..21: mol_type = other RNA
ctatgcccaggtagtatggcg

SEQ ID NO: 2092 - RNA, 21 nt, synthetic construct
  source 1..21: mol_type = other RNA
ctcacacacaaagctggcgat

SEQ ID NO: 2093 - RNA, 21 nt, synthetic construct
  source 1..21: mol_type = other RNA
ctcaccaattacataaatctg

SEQ ID NO: 2094 - RNA, 21 nt, synthetic construct
  source 1..21: mol_type = other RNA
ctcactatccaaggactgagg

SEQ ID NO: 2095 - RNA, 21 nt, synthetic construct
  source 1..21: mol_type = other RNA
ctcagtccttggatagtgagg

SEQ ID NO: 2096 - RNA, 21 nt, synthetic construct
  source 1..21: mol_type = other RNA
ctcagtgaaatggctttgctc

SEQ ID NO: 2097 - RNA, 21 nt, synthetic construct
  source 1..21: mol_type = other RNA
ctcagtggctttgcctggaga

SEQ ID NO: 2098 - RNA, 21 nt, synthetic construct
  source 1..21: mol_type = other RNA
ctcatgtacccaccgccatac

SEQ ID NO: 2099 - RNA, 21 nt, synthetic construct
  source 1..21: mol_type = other RNA
ctcattccccatcatgtaggt

SEQ ID NO: 2100 - RNA, 21 nt, synthetic construct
  source 1..21: mol_type = other RNA
ctccaccttgcagatgtagag

SEQ ID NO: 2101 - RNA, 21 nt, synthetic construct
  source 1..21: mol_type = other RNA
ctccaggcaaagccactgagg

SEQ ID NO: 2102 - RNA, 21 nt, synthetic construct
  source 1..21: mol_type = other RNA
ctccagtggaaatcaagtgaa

SEQ ID NO: 2103 - RNA, 21 nt, synthetic construct
  source 1..21: mol_type = other RNA
ctcggctgctggccagtacca

SEQ ID NO: 2104 - RNA, 21 nt, synthetic construct
  source 1..21: mol_type = other RNA
ctctacatctgcaaggtggag

SEQ ID NO: 2105 - RNA, 21 nt, synthetic construct
  source 1..21: mol_type = other RNA
ctgaagtctgtgcggcaacct

SEQ ID NO: 2106 - RNA, 21 nt, synthetic construct
  source 1..21: mol_type = other RNA
ctgacagccaggtgactgaag

SEQ ID NO: 2107 - RNA, 21 nt, synthetic construct
  source 1..21: mol_type = other RNA
ctgagggccatggacacggga

SEQ ID NO: 2108 - RNA, 21 nt, synthetic construct
  source 1..21: mol_type = other RNA
ctgaggtccgggtgacagtgc

SEQ ID NO: 2109 - RNA, 21 nt, synthetic construct
  source 1..21: mol_type = other RNA
ctgagttccctttggcttttc

SEQ ID NO: 2110 - RNA, 21 nt, synthetic construct
  source 1..21: mol_type = other RNA
ctgcaaggtggagctcatgta

SEQ ID NO: 2111 - RNA, 21 nt, synthetic construct
  source 1..21: mol_type = other RNA
ctgcacgggcacctccagtgg

SEQ ID NO: 2112 - RNA, 21 nt, synthetic construct
  source 1..21: mol_type = other RNA
ctgccgaagcactgtcacccg

SEQ ID NO: 2113 - RNA, 21 nt, synthetic construct
  source 1..21: mol_type = other RNA
ctgctggccagtaccacagca

SEQ ID NO: 2114 - RNA, 21 nt, synthetic construct
  source 1..21: mol_type = other RNA
ctgctgtggtactggccagca

SEQ ID NO: 2115 - RNA, 21 nt, synthetic construct
  source 1..21: mol_type = other RNA
ctggagatgcatactcacaca

SEQ ID NO: 2116 - RNA, 21 nt, synthetic construct
  source 1..21: mol_type = other RNA
ctggaggtgcccgtgcagatg

SEQ ID NO: 2117 - RNA, 21 nt, synthetic construct
  source 1..21: mol_type = other RNA
ctggccagcagccgaggcatc

SEQ ID NO: 2118 - RNA, 21 nt, synthetic construct
  source 1..21: mol_type = other RNA
ctggccagtaccacagcaggc

SEQ ID NO: 2119 - RNA, 21 nt, synthetic construct
  source 1..21: mol_type = other RNA
ctggcgatgcctcggctgctg

SEQ ID NO: 2120 - RNA, 21 nt, synthetic construct
  source 1..21: mol_type = other RNA
ctggctgtcagcctgccgaag

SEQ ID NO: 2121 - RNA, 21 nt, synthetic construct
  source 1..21: mol_type = other RNA
ctgggcataggcaacggaacc

SEQ ID NO: 2122 - RNA, 21 nt, synthetic construct
  source 1..21: mol_type = other RNA
ctgggccacgtgcattgctag

SEQ ID NO: 2123 - RNA, 21 nt, synthetic construct
  source 1..21: mol_type = other RNA
ctgggttccgttgcctatgcc

SEQ ID NO: 2124 - RNA, 21 nt, synthetic construct
  source 1..21: mol_type = other RNA
ctgtcacccggacctcagtgg

SEQ ID NO: 2125 - RNA, 21 nt, synthetic construct
  source 1..21: mol_type = other RNA
ctgtcagcctgccgaagcact

SEQ ID NO: 2126 - RNA, 21 nt, synthetic construct
  source 1..21: mol_type = other RNA
ctgtgcggcaacctacatgat

SEQ ID NO: 2127 - RNA, 21 nt, synthetic construct
  source 1..21: mol_type = other RNA
ctgtggtactggccagcagcc

SEQ ID NO: 2128 - RNA, 21 nt, synthetic construct
  source 1..21: mol_type = other RNA
cttcagtcacctggctgtcag

SEQ ID NO: 2129 - RNA, 21 nt, synthetic construct
  source 1..21: mol_type = other RNA
cttcctagatgattccatctg

SEQ ID NO: 2130 - RNA, 21 nt, synthetic construct
  source 1..21: mol_type = other RNA
cttcggcaggctgacagccag

SEQ ID NO: 2131 - RNA, 21 nt, synthetic construct
  source 1..21: mol_type = other RNA
cttgatttccactggaggtgc

SEQ ID NO: 2132 - RNA, 21 nt, synthetic construct
  source 1..21: mol_type = other RNA
cttgcagatgtagagtcccgt

SEQ ID NO: 2133 - RNA, 21 nt, synthetic construct
  source 1..21: mol_type = other RNA
cttggatagtgaggttcactt

SEQ ID NO: 2134 - RNA, 21 nt, synthetic construct
  source 1..21: mol_type = other RNA
ctttgcctggagatgcatact

SEQ ID NO: 2135 - RNA, 21 nt, synthetic construct
  source 1..21: mol_type = other RNA
ctttgctcaccaattacataa

SEQ ID NO: 2136 - RNA, 21 nt, synthetic construct
  source 1..21: mol_type = other RNA
ctttggcttttccatgctagc

SEQ ID NO: 2137 - RNA, 21 nt, synthetic construct
  source 1..21: mol_type = other RNA
ctttgtgtgtgagtatgcatc

SEQ ID NO: 2138 - RNA, 21 nt, synthetic construct
  source 1..21: mol_type = other RNA
cttttccatgctagcaatgca

SEQ ID NO: 2139 - RNA, 21 nt, synthetic construct
  source 1..21: mol_type = other RNA
gaaaagccaaagggaactcag

SEQ ID NO: 2140 - RNA, 21 nt, synthetic construct
  source 1..21: mol_type = other RNA
gaaatcaagtgaacctcacta

SEQ ID NO: 2141 - RNA, 21 nt, synthetic construct
  source 1..21: mol_type = other RNA
gaaatggctttgctcaccaat

SEQ ID NO: 2142 - RNA, 21 nt, synthetic construct
  source 1..21: mol_type = other RNA
gaacccagatttatgtaattg

SEQ ID NO: 2143 - RNA, 21 nt, synthetic construct
  source 1..21: mol_type = other RNA
gaacctcactatccaaggact

SEQ ID NO: 2144 - RNA, 21 nt, synthetic construct
  source 1..21: mol_type = other RNA
gaagcactgtcacccggacct

SEQ ID NO: 2145 - RNA, 21 nt, synthetic construct
  source 1..21: mol_type = other RNA
gaaggtcaactcattccccat

SEQ ID NO: 2146 - RNA, 21 nt, synthetic construct
  source 1..21: mol_type = other RNA
gaagtctgtgcggcaacctac

SEQ ID NO: 2147 - RNA, 21 nt, synthetic construct
  source 1..21: mol_type = other RNA
gaatcatctaggaaggtcaac

SEQ ID NO: 2148 - RNA, 21 nt, synthetic construct
  source 1..21: mol_type = other RNA
gaatgagttgaccttcctaga

SEQ ID NO: 2149 - RNA, 21 nt, synthetic construct
  source 1..21: mol_type = other RNA
gacacgggactctacatctgc

SEQ ID NO: 2150 - RNA, 21 nt, synthetic construct
  source 1..21: mol_type = other RNA
gacagccaggtgactgaagtc

SEQ ID NO: 2151 - RNA, 21 nt, synthetic construct
  source 1..21: mol_type = other RNA
gacagtgcttcggcaggctga

SEQ ID NO: 2152 - RNA, 21 nt, synthetic construct
  source 1..21: mol_type = other RNA
gacctcagtggctttgcctgg

SEQ ID NO: 2153 - RNA, 21 nt, synthetic construct
  source 1..21: mol_type = other RNA
gaccttcctagatgattccat

SEQ ID NO: 2154 - RNA, 21 nt, synthetic construct
  source 1..21: mol_type = other RNA
gactctacatctgcaaggtgg

SEQ ID NO: 2155 - RNA, 21 nt, synthetic construct
  source 1..21: mol_type = other RNA
gactgaagtctgtgcggcaac

SEQ ID NO: 2156 - RNA, 21 nt, synthetic construct
  source 1..21: mol_type = other RNA
gactgagggccatggacacgg

SEQ ID NO: 2157 - RNA, 21 nt, synthetic construct
  source 1..21: mol_type = other RNA
gacttcagtcacctggctgtc

SEQ ID NO: 2158 - RNA, 21 nt, synthetic construct
  source 1..21: mol_type = other RNA
gagatgcatactcacacacaa

SEQ ID NO: 2159 - RNA, 21 nt, synthetic construct
  source 1..21: mol_type = other RNA
gagcaaagccatttcactgag

SEQ ID NO: 2160 - RNA, 21 nt, synthetic construct
  source 1..21: mol_type = other RNA
gagctcatgtacccaccgcca

SEQ ID NO: 2161 - RNA, 21 nt, synthetic construct
  source 1..21: mol_type = other RNA
gagctccaccttgcagatgta

SEQ ID NO: 2162 - RNA, 21 nt, synthetic construct
  source 1..21: mol_type = other RNA
gaggcatcgccagctttgtgt

SEQ ID NO: 2163 - RNA, 21 nt, synthetic construct
  source 1..21: mol_type = other RNA
gagggccatggacacgggact

SEQ ID NO: 2164 - RNA, 21 nt, synthetic construct
  source 1..21: mol_type = other RNA
gaggtccgggtgacagtgctt

SEQ ID NO: 2165 - RNA, 21 nt, synthetic construct
  source 1..21: mol_type = other RNA
gaggtgcccgtgcagatggaa

SEQ ID NO: 2166 - RNA, 21 nt, synthetic construct
  source 1..21: mol_type = other RNA
gaggttcacttgatttccact

SEQ ID NO: 2167 - RNA, 21 nt, synthetic construct
  source 1..21: mol_type = other RNA
gagtatgcatctccaggcaaa

SEQ ID NO: 2168 - RNA, 21 nt, synthetic construct
  source 1..21: mol_type = other RNA
gagtcccgtgtccatggccct

SEQ ID NO: 2169 - RNA, 21 nt, synthetic construct
  source 1..21: mol_type = other RNA
gagttcactgagttccctttg

SEQ ID NO: 2170 - RNA, 21 nt, synthetic construct
  source 1..21: mol_type = other RNA
gagttccctttggcttttcca

SEQ ID NO: 2171 - RNA, 21 nt, synthetic construct
  source 1..21: mol_type = other RNA
gagttgaccttcctagatgat

SEQ ID NO: 2172 - RNA, 21 nt, synthetic construct
  source 1..21: mol_type = other RNA
gatagtgaggttcacttgatt

SEQ ID NO: 2173 - RNA, 21 nt, synthetic construct
  source 1..21: mol_type = other RNA
gatgattccatctgcacgggc

SEQ ID NO: 2174 - RNA, 21 nt, synthetic construct
  source 1..21: mol_type = other RNA
gatgcatactcacacacaaag

SEQ ID NO: 2175 - RNA, 21 nt, synthetic construct
  source 1..21: mol_type = other RNA
gatgcctcggctgctggccag

SEQ ID NO: 2176 - RNA, 21 nt, synthetic construct
  source 1..21: mol_type = other RNA
gatggaatcatctaggaaggt

SEQ ID NO: 2177 - RNA, 21 nt, synthetic construct
  source 1..21: mol_type = other RNA
gatggggaatgagttgacctt

SEQ ID NO: 2178 - RNA, 21 nt, synthetic construct
  source 1..21: mol_type = other RNA
gatgtagagtcccgtgtccat

SEQ ID NO: 2179 - RNA, 21 nt, synthetic construct
  source 1..21: mol_type = other RNA
gattccatctgcacgggcacc

SEQ ID NO: 2180 - RNA, 21 nt, synthetic construct
  source 1..21: mol_type = other RNA
gatttatgtaattggtgagca

SEQ ID NO: 2181 - RNA, 21 nt, synthetic construct
  source 1..21: mol_type = other RNA
gatttccactggaggtgcccg

SEQ ID NO: 2182 - RNA, 21 nt, synthetic construct
  source 1..21: mol_type = other RNA
gcaaagccactgaggtccggg

SEQ ID NO: 2183 - RNA, 21 nt, synthetic construct
  source 1..21: mol_type = other RNA
gcaaagccatttcactgagtt

SEQ ID NO: 2184 - RNA, 21 nt, synthetic construct
  source 1..21: mol_type = other RNA
gcaacaggtgtcaactcagtg

SEQ ID NO: 2185 - RNA, 21 nt, synthetic construct
  source 1..21: mol_type = other RNA
gcaacctacatgatggggaat

SEQ ID NO: 2186 - RNA, 21 nt, synthetic construct
  source 1..21: mol_type = other RNA
gcaacggaacccagatttatg

SEQ ID NO: 2187 - RNA, 21 nt, synthetic construct
  source 1..21: mol_type = other RNA
gcaaggtggagctcatgtacc

SEQ ID NO: 2188 - RNA, 21 nt, synthetic construct
  source 1..21: mol_type = other RNA
gcaatgcacgtggcccagcct

SEQ ID NO: 2189 - RNA, 21 nt, synthetic construct
  source 1..21: mol_type = other RNA
gcacagacttcagtcacctgg

SEQ ID NO: 2190 - RNA, 21 nt, synthetic construct
  source 1..21: mol_type = other RNA
gcacctccagtggaaatcaag

SEQ ID NO: 2191 - RNA, 21 nt, synthetic construct
  source 1..21: mol_type = other RNA
gcacgggcacctccagtggaa

SEQ ID NO: 2192 - RNA, 21 nt, synthetic construct
  source 1..21: mol_type = other RNA
gcacgtggcccagcctgctgt

SEQ ID NO: 2193 - RNA, 21 nt, synthetic construct
  source 1..21: mol_type = other RNA
gcactgtcacccggacctcag

SEQ ID NO: 2194 - RNA, 21 nt, synthetic construct
  source 1..21: mol_type = other RNA
gcagatggaatcatctaggaa

SEQ ID NO: 2195 - RNA, 21 nt, synthetic construct
  source 1..21: mol_type = other RNA
gcagatgtagagtcccgtgtc

SEQ ID NO: 2196 - RNA, 21 nt, synthetic construct
  source 1..21: mol_type = other RNA
gcagccgaggcatcgccagct

SEQ ID NO: 2197 - RNA, 21 nt, synthetic construct
  source 1..21: mol_type = other RNA
gcaggctgacagccaggtgac

SEQ ID NO: 2198 - RNA, 21 nt, synthetic construct
  source 1..21: mol_type = other RNA
gcaggctgggccacgtgcatt

SEQ ID NO: 2199 - RNA, 21 nt, synthetic construct
  source 1..21: mol_type = other RNA
gcatactcacacacaaagctg

SEQ ID NO: 2200 - RNA, 21 nt, synthetic construct
  source 1..21: mol_type = other RNA
gcataggcaacggaacccaga

SEQ ID NO: 2201 - RNA, 21 nt, synthetic construct
  source 1..21: mol_type = other RNA
gcatcgccagctttgtgtgtg

SEQ ID NO: 2202 - RNA, 21 nt, synthetic construct
  source 1..21: mol_type = other RNA
gcatctccaggcaaagccact

SEQ ID NO: 2203 - RNA, 21 nt, synthetic construct
  source 1..21: mol_type = other RNA
gcatggaaaagccaaagggaa

SEQ ID NO: 2204 - RNA, 21 nt, synthetic construct
  source 1..21: mol_type = other RNA
gcattgctagcatggaaaagc

SEQ ID NO: 2205 - RNA, 21 nt, synthetic construct
  source 1..21: mol_type = other RNA
gccacgtgcattgctagcatg

SEQ ID NO: 2206 - RNA, 21 nt, synthetic construct
  source 1..21: mol_type = other RNA
gccactgaggtccgggtgaca

SEQ ID NO: 2207 - RNA, 21 nt, synthetic construct
  source 1..21: mol_type = other RNA
gccagcagccgaggcatcgcc

SEQ ID NO: 2208 - RNA, 21 nt, synthetic construct
  source 1..21: mol_type = other RNA
gccagctttgtgtgtgagtat

SEQ ID NO: 2209 - RNA, 21 nt, synthetic construct
  source 1..21: mol_type = other RNA
gccaggtgactgaagtctgtg

SEQ ID NO: 2210 - RNA, 21 nt, synthetic construct
  source 1..21: mol_type = other RNA
gccagtaccacagcaggctgg

SEQ ID NO: 2211 - RNA, 21 nt, synthetic construct
  source 1..21: mol_type = other RNA
gccatactacctgggcatagg

SEQ ID NO: 2212 - RNA, 21 nt, synthetic construct
  source 1..21: mol_type = other RNA
gccatggacacgggactctac

SEQ ID NO: 2213 - RNA, 21 nt, synthetic construct
  source 1..21: mol_type = other RNA
gccatttcactgagttgacac

SEQ ID NO: 2214 - RNA, 21 nt, synthetic construct
  source 1..21: mol_type = other RNA
gcccagcctgctgtggtactg

SEQ ID NO: 2215 - RNA, 21 nt, synthetic construct
  source 1..21: mol_type = other RNA
gcccaggtagtatggcggtgg

SEQ ID NO: 2216 - RNA, 21 nt, synthetic construct
  source 1..21: mol_type = other RNA
gcccgtgcagatggaatcatc

SEQ ID NO: 2217 - RNA, 21 nt, synthetic construct
  source 1..21: mol_type = other RNA
gccctcagtccttggatagtg

SEQ ID NO: 2218 - RNA, 21 nt, synthetic construct
  source 1..21: mol_type = other RNA
gccgaagcactgtcacccgga

SEQ ID NO: 2219 - RNA, 21 nt, synthetic construct
  source 1..21: mol_type = other RNA
gccgaggcatcgccagctttg

SEQ ID NO: 2220 - RNA, 21 nt, synthetic construct
  source 1..21: mol_type = other RNA
gccgcacagacttcagtcacc

SEQ ID NO: 2221 - RNA, 21 nt, synthetic construct
  source 1..21: mol_type = other RNA
gcctatgcccaggtagtatgg

SEQ ID NO: 2222 - RNA, 21 nt, synthetic construct
  source 1..21: mol_type = other RNA
gcctcggctgctggccagtac

SEQ ID NO: 2223 - RNA, 21 nt, synthetic construct
  source 1..21: mol_type = other RNA
gcctgccgaagcactgtcacc

SEQ ID NO: 2224 - RNA, 21 nt, synthetic construct
  source 1..21: mol_type = other RNA
gcctgctgtggtactggccag

SEQ ID NO: 2225 - RNA, 21 nt, synthetic construct
  source 1..21: mol_type = other RNA
gcctggagatgcatactcaca

SEQ ID NO: 2226 - RNA, 21 nt, synthetic construct
  source 1..21: mol_type = other RNA
gcgatgcctcggctgctggcc

SEQ ID NO: 2227 - RNA, 21 nt, synthetic construct
  source 1..21: mol_type = other RNA
gcggcaacctacatgatgggg

SEQ ID NO: 2228 - RNA, 21 nt, synthetic construct
  source 1..21: mol_type = other RNA
gcggtgggtacatgagctcca

SEQ ID NO: 2229 - RNA, 21 nt, synthetic construct
  source 1..21: mol_type = other RNA
gctagcaatgcacgtggccca

SEQ ID NO: 2230 - RNA, 21 nt, synthetic construct
  source 1..21: mol_type = other RNA
gctagcatggaaaagccaaag

SEQ ID NO: 2231 - RNA, 21 nt, synthetic construct
  source 1..21: mol_type = other RNA
gctcaccaattacataaatct

SEQ ID NO: 2232 - RNA, 21 nt, synthetic construct
  source 1..21: mol_type = other RNA
gctcatgtacccaccgccata

SEQ ID NO: 2233 - RNA, 21 nt, synthetic construct
  source 1..21: mol_type = other RNA
gctccaccttgcagatgtaga

SEQ ID NO: 2234 - RNA, 21 nt, synthetic construct
  source 1..21: mol_type = other RNA
gctgacagccaggtgactgaa

SEQ ID NO: 2235 - RNA, 21 nt, synthetic construct
  source 1..21: mol_type = other RNA
gctgctggccagtaccacagc

SEQ ID NO: 2236 - RNA, 21 nt, synthetic construct
  source 1..21: mol_type = other RNA
gctggccagtaccacagcagg

SEQ ID NO: 2237 - RNA, 21 nt, synthetic construct
  source 1..21: mol_type = other RNA
gctggcgatgcctcggctgct

SEQ ID NO: 2238 - RNA, 21 nt, synthetic construct
  source 1..21: mol_type = other RNA
gctgggccacgtgcattgcta

SEQ ID NO: 2239 - RNA, 21 nt, synthetic construct
  source 1..21: mol_type = other RNA
gctgtcagcctgccgaagcac

SEQ ID NO: 2240 - RNA, 21 nt, synthetic construct
  source 1..21: mol_type = other RNA
gctgtggtactggccagcagc

SEQ ID NO: 2241 - RNA, 21 nt, synthetic construct
  source 1..21: mol_type = other RNA
gcttcggcaggctgacagcca

SEQ ID NO: 2242 - RNA, 21 nt, synthetic construct
  source 1..21: mol_type = other RNA
gctttgcctggagatgcatac

SEQ ID NO: 2243 - RNA, 21 nt, synthetic construct
  source 1..21: mol_type = other RNA
gctttgctcaccaattacata

SEQ ID NO: 2244 - RNA, 21 nt, synthetic construct
  source 1..21: mol_type = other RNA
gctttgtgtgtgagtatgcat

SEQ ID NO: 2245 - RNA, 21 nt, synthetic construct
  source 1..21: mol_type = other RNA
gcttttccatgctagcaatgc

SEQ ID NO: 2246 - RNA, 21 nt, synthetic construct
  source 1..21: mol_type = other RNA
ggaaaagccaaagggaactca

SEQ ID NO: 2247 - RNA, 21 nt, synthetic construct
  source 1..21: mol_type = other RNA
ggaaatcaagtgaacctcact

SEQ ID NO: 2248 - RNA, 21 nt, synthetic construct
  source 1..21: mol_type = other RNA
ggaacccagatttatgtaatt

SEQ ID NO: 2249 - RNA, 21 nt, synthetic construct
  source 1..21: mol_type = other RNA
ggaaggtcaactcattcccca

SEQ ID NO: 2250 - RNA, 21 nt, synthetic construct
  source 1..21: mol_type = other RNA
ggaatcatctaggaaggtcaa

SEQ ID NO: 2251 - RNA, 21 nt, synthetic construct
  source 1..21: mol_type = other RNA
ggaatgagttgaccttcctag

SEQ ID NO: 2252 - RNA, 21 nt, synthetic construct
  source 1..21: mol_type = other RNA
ggacacgggactctacatctg

SEQ ID NO: 2253 - RNA, 21 nt, synthetic construct
  source 1..21: mol_type = other RNA
ggacctcagtggctttgcctg

SEQ ID NO: 2254 - RNA, 21 nt, synthetic construct
  source 1..21: mol_type = other RNA
ggactctacatctgcaaggtg

SEQ ID NO: 2255 - RNA, 21 nt, synthetic construct
  source 1..21: mol_type = other RNA
ggactgagggccatggacacg

SEQ ID NO: 2256 - RNA, 21 nt, synthetic construct
  source 1..21: mol_type = other RNA
ggagatgcatactcacacaca

SEQ ID NO: 2257 - RNA, 21 nt, synthetic construct
  source 1..21: mol_type = other RNA
ggagctcatgtacccaccgcc

SEQ ID NO: 2258 - RNA, 21 nt, synthetic construct
  source 1..21: mol_type = other RNA
ggaggtgcccgtgcagatgga

SEQ ID NO: 2259 - RNA, 21 nt, synthetic construct
  source 1..21: mol_type = other RNA
ggatagtgaggttcacttgat

SEQ ID NO: 2260 - RNA, 21 nt, synthetic construct
  source 1..21: mol_type = other RNA
ggcaaagccactgaggtccgg

SEQ ID NO: 2261 - RNA, 21 nt, synthetic construct
  source 1..21: mol_type = other RNA
ggcaacctacatgatggggaa

SEQ ID NO: 2262 - RNA, 21 nt, synthetic construct
  source 1..21: mol_type = other RNA
ggcaacggaacccagatttat

SEQ ID NO: 2263 - RNA, 21 nt, synthetic construct
  source 1..21: mol_type = other RNA
ggcacctccagtggaaatcaa

SEQ ID NO: 2264 - RNA, 21 nt, synthetic construct
  source 1..21: mol_type = other RNA
ggcaggctgacagccaggtga

SEQ ID NO: 2265 - RNA, 21 nt, synthetic construct
  source 1..21: mol_type = other RNA
ggcataggcaacggaacccag

SEQ ID NO: 2266 - RNA, 21 nt, synthetic construct
  source 1..21: mol_type = other RNA
ggcatcgccagctttgtgtgt

SEQ ID NO: 2267 - RNA, 21 nt, synthetic construct
  source 1..21: mol_type = other RNA
ggccacgtgcattgctagcat

SEQ ID NO: 2268 - RNA, 21 nt, synthetic construct
  source 1..21: mol_type = other RNA
ggccagcagccgaggcatcgc

SEQ ID NO: 2269 - RNA, 21 nt, synthetic construct
  source 1..21: mol_type = other RNA
ggccagtaccacagcaggctg

SEQ ID NO: 2270 - RNA, 21 nt, synthetic construct
  source 1..21: mol_type = other RNA
ggccatggacacgggactcta

SEQ ID NO: 2271 - RNA, 21 nt, synthetic construct
  source 1..21: mol_type = other RNA
ggcccagcctgctgtggtact

SEQ ID NO: 2272 - RNA, 21 nt, synthetic construct
  source 1..21: mol_type = other RNA
ggccctcagtccttggatagt

SEQ ID NO: 2273 - RNA, 21 nt, synthetic construct
  source 1..21: mol_type = other RNA
ggcgatgcctcggctgctggc

SEQ ID NO: 2274 - RNA, 21 nt, synthetic construct
  source 1..21: mol_type = other RNA
ggcggtgggtacatgagctcc

SEQ ID NO: 2275 - RNA, 21 nt, synthetic construct
  source 1..21: mol_type = other RNA
ggctgacagccaggtgactga

SEQ ID NO: 2276 - RNA, 21 nt, synthetic construct
  source 1..21: mol_type = other RNA
ggctgctggccagtaccacag

SEQ ID NO: 2277 - RNA, 21 nt, synthetic construct
  source 1..21: mol_type = other RNA
ggctgggccacgtgcattgct

SEQ ID NO: 2278 - RNA, 21 nt, synthetic construct
  source 1..21: mol_type = other RNA
ggctgtcagcctgccgaagca

SEQ ID NO: 2279 - RNA, 21 nt, synthetic construct
  source 1..21: mol_type = other RNA
ggctttgcctggagatgcata

SEQ ID NO: 2280 - RNA, 21 nt, synthetic construct
  source 1..21: mol_type = other RNA
ggctttgctcaccaattacat

SEQ ID NO: 2281 - RNA, 21 nt, synthetic construct
  source 1..21: mol_type = other RNA
ggcttttccatgctagcaatg

SEQ ID NO: 2282 - RNA, 21 nt, synthetic construct
  source 1..21: mol_type = other RNA
gggaatgagttgaccttccta

SEQ ID NO: 2283 - RNA, 21 nt, synthetic construct
  source 1..21: mol_type = other RNA
gggactctacatctgcaaggt

SEQ ID NO: 2284 - RNA, 21 nt, synthetic construct
  source 1..21: mol_type = other RNA
gggcacctccagtggaaatca

SEQ ID NO: 2285 - RNA, 21 nt, synthetic construct
  source 1..21: mol_type = other RNA
gggcataggcaacggaaccca

SEQ ID NO: 2286 - RNA, 21 nt, synthetic construct
  source 1..21: mol_type = other RNA
gggccacgtgcattgctagca

SEQ ID NO: 2287 - RNA, 21 nt, synthetic construct
  source 1..21: mol_type = other RNA
gggccatggacacgggactct

SEQ ID NO: 2288 - RNA, 21 nt, synthetic construct
  source 1..21: mol_type = other RNA
ggggaatgagttgaccttcct

SEQ ID NO: 2289 - RNA, 21 nt, synthetic construct
  source 1..21: mol_type = other RNA
gggtacatgagctccaccttg

SEQ ID NO: 2290 - RNA, 21 nt, synthetic construct
  source 1..21: mol_type = other RNA
gggtgacagtgcttcggcagg

SEQ ID NO: 2291 - RNA, 21 nt, synthetic construct
  source 1..21: mol_type = other RNA
gggttccgttgcctatgccca

SEQ ID NO: 2292 - RNA, 21 nt, synthetic construct
  source 1..21: mol_type = other RNA
ggtacatgagctccaccttgc

SEQ ID NO: 2293 - RNA, 21 nt, synthetic construct
  source 1..21: mol_type = other RNA
ggtactggccagcagccgagg

SEQ ID NO: 2294 - RNA, 21 nt, synthetic construct
  source 1..21: mol_type = other RNA
ggtagtatggcggtgggtaca

SEQ ID NO: 2295 - RNA, 21 nt, synthetic construct
  source 1..21: mol_type = other RNA
ggtcaactcattccccatcat

SEQ ID NO: 2296 - RNA, 21 nt, synthetic construct
  source 1..21: mol_type = other RNA
ggtccgggtgacagtgcttcg

SEQ ID NO: 2297 - RNA, 21 nt, synthetic construct
  source 1..21: mol_type = other RNA
ggtgacagtgcttcggcaggc

SEQ ID NO: 2298 - RNA, 21 nt, synthetic construct
  source 1..21: mol_type = other RNA
ggtgactgaagtctgtgcggc

SEQ ID NO: 2299 - RNA, 21 nt, synthetic construct
  source 1..21: mol_type = other RNA
ggtgagcaaagccatttcact

SEQ ID NO: 2300 - RNA, 21 nt, synthetic construct
  source 1..21: mol_type = other RNA
ggtgcccgtgcagatggaatc

SEQ ID NO: 2301 - RNA, 21 nt, synthetic construct
  source 1..21: mol_type = other RNA
ggtggagctcatgtacccacc

SEQ ID NO: 2302 - RNA, 21 nt, synthetic construct
  source 1..21: mol_type = other RNA
ggtgggtacatgagctccacc

SEQ ID NO: 2303 - RNA, 21 nt, synthetic construct
  source 1..21: mol_type = other RNA
ggtgtcaactcagtgaaatgg

SEQ ID NO: 2304 - RNA, 21 nt, synthetic construct
  source 1..21: mol_type = other RNA
ggttcacttgatttccactgg

SEQ ID NO: 2305 - RNA, 21 nt, synthetic construct
  source 1..21: mol_type = other RNA
ggttccgttgcctatgcccag

SEQ ID NO: 2306 - RNA, 21 nt, synthetic construct
  source 1..21: mol_type = other RNA
ggttgccgcacagacttcagt

SEQ ID NO: 2307 - RNA, 21 nt, synthetic construct
  source 1..21: mol_type = other RNA
gtaattggtgagcaaagccat

SEQ ID NO: 2308 - RNA, 21 nt, synthetic construct
  source 1..21: mol_type = other RNA
gtacatgagctccaccttgca

SEQ ID NO: 2309 - RNA, 21 nt, synthetic construct
  source 1..21: mol_type = other RNA
gtaccacagcaggctgggcca

SEQ ID NO: 2310 - RNA, 21 nt, synthetic construct
  source 1..21: mol_type = other RNA
gtacccaccgccatactacct

SEQ ID NO: 2311 - RNA, 21 nt, synthetic construct
  source 1..21: mol_type = other RNA
gtactggccagcagccgaggc

SEQ ID NO: 2312 - RNA, 21 nt, synthetic construct
  source 1..21: mol_type = other RNA
gtagagtcccgtgtccatggc

SEQ ID NO: 2313 - RNA, 21 nt, synthetic construct
  source 1..21: mol_type = other RNA
gtaggttgccgcacagacttc

SEQ ID NO: 2314 - RNA, 21 nt, synthetic construct
  source 1..21: mol_type = other RNA
gtagtatggcggtgggtacat

SEQ ID NO: 2315 - RNA, 21 nt, synthetic construct
  source 1..21: mol_type = other RNA
gtatgcatctccaggcaaagc

SEQ ID NO: 2316 - RNA, 21 nt, synthetic construct
  source 1..21: mol_type = other RNA
gtatggcggtgggtacatgag

SEQ ID NO: 2317 - RNA, 21 nt, synthetic construct
  source 1..21: mol_type = other RNA
gtcaactcagtgaaatggctt

SEQ ID NO: 2318 - RNA, 21 nt, synthetic construct
  source 1..21: mol_type = other RNA
gtcaactcattccccatcatg

SEQ ID NO: 2319 - RNA, 21 nt, synthetic construct
  source 1..21: mol_type = other RNA
gtcacccggacctcagtggct

SEQ ID NO: 2320 - RNA, 21 nt, synthetic construct
  source 1..21: mol_type = other RNA
gtcacctggctgtcagcctgc

SEQ ID NO: 2321 - RNA, 21 nt, synthetic construct
  source 1..21: mol_type = other RNA
gtcagcctgccgaagcactgt

SEQ ID NO: 2322 - RNA, 21 nt, synthetic construct
  source 1..21: mol_type = other RNA
gtccatggccctcagtccttg

SEQ ID NO: 2323 - RNA, 21 nt, synthetic construct
  source 1..21: mol_type = other RNA
gtcccgtgtccatggccctca

SEQ ID NO: 2324 - RNA, 21 nt, synthetic construct
  source 1..21: mol_type = other RNA
gtccgggtgacagtgcttcgg

SEQ ID NO: 2325 - RNA, 21 nt, synthetic construct
  source 1..21: mol_type = other RNA
gtccttggatagtgaggttca

SEQ ID NO: 2326 - RNA, 21 nt, synthetic construct
  source 1..21: mol_type = other RNA
gtctgtgcggcaacctacatg

SEQ ID NO: 2327 - RNA, 21 nt, synthetic construct
  source 1..21: mol_type = other RNA
gtgaaatggctttgctcacca

SEQ ID NO: 2328 - RNA, 21 nt, synthetic construct
  source 1..21: mol_type = other RNA
gtgaacctcactatccaagga

SEQ ID NO: 2329 - RNA, 21 nt, synthetic construct
  source 1..21: mol_type = other RNA
gtgacagtgcttcggcaggct

SEQ ID NO: 2330 - RNA, 21 nt, synthetic construct
  source 1..21: mol_type = other RNA
gtgactgaagtctgtgcggca

SEQ ID NO: 2331 - RNA, 21 nt, synthetic construct
  source 1..21: mol_type = other RNA
gtgagcaaagccatttcactg

SEQ ID NO: 2332 - RNA, 21 nt, synthetic construct
  source 1..21: mol_type = other RNA
gtgaggttcacttgatttcca

SEQ ID NO: 2333 - RNA, 21 nt, synthetic construct
  source 1..21: mol_type = other RNA
gtgagtatgcatctccaggca

SEQ ID NO: 2334 - RNA, 21 nt, synthetic construct
  source 1..21: mol_type = other RNA
gtgcagatggaatcatctagg

SEQ ID NO: 2335 - RNA, 21 nt, synthetic construct
  source 1..21: mol_type = other RNA
gtgcattgctagcatggaaaa

SEQ ID NO: 2336 - RNA, 21 nt, synthetic construct
  source 1..21: mol_type = other RNA
gtgcccgtgcagatggaatca

SEQ ID NO: 2337 - RNA, 21 nt, synthetic construct
  source 1..21: mol_type = other RNA
gtgcggcaacctacatgatgg

SEQ ID NO: 2338 - RNA, 21 nt, synthetic construct
  source 1..21: mol_type = other RNA
gtgcttcggcaggctgacagc

SEQ ID NO: 2339 - RNA, 21 nt, synthetic construct
  source 1..21: mol_type = other RNA
gtggaaatcaagtgaacctca

SEQ ID NO: 2340 - RNA, 21 nt, synthetic construct
  source 1..21: mol_type = other RNA
gtggagctcatgtacccaccg

SEQ ID NO: 2341 - RNA, 21 nt, synthetic construct
  source 1..21: mol_type = other RNA
gtggcccagcctgctgtggta

SEQ ID NO: 2342 - RNA, 21 nt, synthetic construct
  source 1..21: mol_type = other RNA
gtggctttgcctggagatgca

SEQ ID NO: 2343 - RNA, 21 nt, synthetic construct
  source 1..21: mol_type = other RNA
gtgggtacatgagctccacct

SEQ ID NO: 2344 - RNA, 21 nt, synthetic construct
  source 1..21: mol_type = other RNA
gtggtactggccagcagccga

SEQ ID NO: 2345 - RNA, 21 nt, synthetic construct
  source 1..21: mol_type = other RNA
gtgtcaactcagtgaaatggc

SEQ ID NO: 2346 - RNA, 21 nt, synthetic construct
  source 1..21: mol_type = other RNA
gtgtccatggccctcagtcct

SEQ ID NO: 2347 - RNA, 21 nt, synthetic construct
  source 1..21: mol_type = other RNA
gtgtgagtatgcatctccagg

SEQ ID NO: 2348 - RNA, 21 nt, synthetic construct
  source 1..21: mol_type = other RNA
gtgtgtgagtatgcatctcca

SEQ ID NO: 2349 - RNA, 21 nt, synthetic construct
  source 1..21: mol_type = other RNA
gttcactgagttccctttggc

SEQ ID NO: 2350 - RNA, 21 nt, synthetic construct
  source 1..21: mol_type = other RNA
gttcacttgatttccactgga

SEQ ID NO: 2351 - RNA, 21 nt, synthetic construct
  source 1..21: mol_type = other RNA
gttccctttggcttttccatg

SEQ ID NO: 2352 - RNA, 21 nt, synthetic construct
  source 1..21: mol_type = other RNA
gttccgttgcctatgcccagg

SEQ ID NO: 2353 - RNA, 21 nt, synthetic construct
  source 1..21: mol_type = other RNA
gttgaccttcctagatgattc

SEQ ID NO: 2354 - RNA, 21 nt, synthetic construct
  source 1..21: mol_type = other RNA
gttgccgcacagacttcagtc

SEQ ID NO: 2355 - RNA, 21 nt, synthetic construct
  source 1..21: mol_type = other RNA
gttgcctatgcccaggtagta

SEQ ID NO: 2356 - RNA, 21 nt, synthetic construct
  source 1..21: mol_type = other RNA
taaatctgggttccgttgcct

SEQ ID NO: 2357 - RNA, 21 nt, synthetic construct
  source 1..21: mol_type = other RNA
taattggtgagcaaagccatt

SEQ ID NO: 2358 - RNA, 21 nt, synthetic construct
  source 1..21: mol_type = other RNA
tacataaatctgggttccgtt

SEQ ID NO: 2359 - RNA, 21 nt, synthetic construct
  source 1..21: mol_type = other RNA
tacatctgcaaggtggagctc

SEQ ID NO: 2360 - RNA, 21 nt, synthetic construct
  source 1..21: mol_type = other RNA
tacatgagctccaccttgcag

SEQ ID NO: 2361 - RNA, 21 nt, synthetic construct
  source 1..21: mol_type = other RNA
tacatgatggggaatgagttg

SEQ ID NO: 2362 - RNA, 21 nt, synthetic construct
  source 1..21: mol_type = other RNA
taccacagcaggctgggccac

SEQ ID NO: 2363 - RNA, 21 nt, synthetic construct
  source 1..21: mol_type = other RNA
tacccaccgccatactacctg

SEQ ID NO: 2364 - RNA, 21 nt, synthetic construct
  source 1..21: mol_type = other RNA
tacctgggcataggcaacgga

SEQ ID NO: 2365 - RNA, 21 nt, synthetic construct
  source 1..21: mol_type = other RNA
tactacctgggcataggcaac

SEQ ID NO: 2366 - RNA, 21 nt, synthetic construct
  source 1..21: mol_type = other RNA
tactcacacacaaagctggcg

SEQ ID NO: 2367 - RNA, 21 nt, synthetic construct
  source 1..21: mol_type = other RNA
tactggccagcagccgaggca

SEQ ID NO: 2368 - RNA, 21 nt, synthetic construct
  source 1..21: mol_type = other RNA
tagagtcccgtgtccatggcc

SEQ ID NO: 2369 - RNA, 21 nt, synthetic construct
  source 1..21: mol_type = other RNA
tagatgattccatctgcacgg

SEQ ID NO: 2370 - RNA, 21 nt, synthetic construct
  source 1..21: mol_type = other RNA
tagcaatgcacgtggcccagc

SEQ ID NO: 2371 - RNA, 21 nt, synthetic construct
  source 1..21: mol_type = other RNA
tagcatggaaaagccaaaggg

SEQ ID NO: 2372 - RNA, 21 nt, synthetic construct
  source 1..21: mol_type = other RNA
taggaaggtcaactcattccc

SEQ ID NO: 2373 - RNA, 21 nt, synthetic construct
  source 1..21: mol_type = other RNA
taggcaacggaacccagattt

SEQ ID NO: 2374 - RNA, 21 nt, synthetic construct
  source 1..21: mol_type = other RNA
taggttgccgcacagacttca

SEQ ID NO: 2375 - RNA, 21 nt, synthetic construct
  source 1..21: mol_type = other RNA
tagtatggcggtgggtacatg

SEQ ID NO: 2376 - RNA, 21 nt, synthetic construct
  source 1..21: mol_type = other RNA
tagtgaggttcacttgatttc

SEQ ID NO: 2377 - RNA, 21 nt, synthetic construct
  source 1..21: mol_type = other RNA
tatccaaggactgagggccat

SEQ ID NO: 2378 - RNA, 21 nt, synthetic construct
  source 1..21: mol_type = other RNA
tatgcatctccaggcaaagcc

SEQ ID NO: 2379 - RNA, 21 nt, synthetic construct
  source 1..21: mol_type = other RNA
tatgcccaggtagtatggcgg

SEQ ID NO: 2380 - RNA, 21 nt, synthetic construct
  source 1..21: mol_type = other RNA
tatggcggtgggtacatgagc

SEQ ID NO: 2381 - RNA, 21 nt, synthetic construct
  source 1..21: mol_type = other RNA
tatgtaattggtgagcaaagc

SEQ ID NO: 2382 - RNA, 21 nt, synthetic construct
  source 1..21: mol_type = other RNA
tcaactcagtgaaatggcttt

SEQ ID NO: 2383 - RNA, 21 nt, synthetic construct
  source 1..21: mol_type = other RNA
tcaactcattccccatcatgt

SEQ ID NO: 2384 - RNA, 21 nt, synthetic construct
  source 1..21: mol_type = other RNA
tcaagtgaacctcactatcca

SEQ ID NO: 2385 - RNA, 21 nt, synthetic construct
  source 1..21: mol_type = other RNA
tcacacacaaagctggcgatg

SEQ ID NO: 2386 - RNA, 21 nt, synthetic construct
  source 1..21: mol_type = other RNA
tcaccaattacataaatctgg

SEQ ID NO: 2387 - RNA, 21 nt, synthetic construct
  source 1..21: mol_type = other RNA
tcacccggacctcagtggctt

SEQ ID NO: 2388 - RNA, 21 nt, synthetic construct
  source 1..21: mol_type = other RNA
tcacctggctgtcagcctgcc

SEQ ID NO: 2389 - RNA, 21 nt, synthetic construct
  source 1..21: mol_type = other RNA
tcactatccaaggactgaggg

SEQ ID NO: 2390 - RNA, 21 nt, synthetic construct
  source 1..21: mol_type = other RNA
tcactgagttccctttggctt

SEQ ID NO: 2391 - RNA, 21 nt, synthetic construct
  source 1..21: mol_type = other RNA
tcacttgatttccactggagg

SEQ ID NO: 2392 - RNA, 21 nt, synthetic construct
  source 1..21: mol_type = other RNA
tcagcctgccgaagcactgtc

SEQ ID NO: 2393 - RNA, 21 nt, synthetic construct
  source 1..21: mol_type = other RNA
tcagtcacctggctgtcagcc

SEQ ID NO: 2394 - RNA, 21 nt, synthetic construct
  source 1..21: mol_type = other RNA
tcagtccttggatagtgaggt

SEQ ID NO: 2395 - RNA, 21 nt, synthetic construct
  source 1..21: mol_type = other RNA
tcagtgaaatggctttgctca

SEQ ID NO: 2396 - RNA, 21 nt, synthetic construct
  source 1..21: mol_type = other RNA
tcagtggctttgcctggagat

SEQ ID NO: 2397 - RNA, 21 nt, synthetic construct
  source 1..21: mol_type = other RNA
tcatctaggaaggtcaactca

SEQ ID NO: 2398 - RNA, 21 nt, synthetic construct
  source 1..21: mol_type = other RNA
tcatgtacccaccgccatact

SEQ ID NO: 2399 - RNA, 21 nt, synthetic construct
  source 1..21: mol_type = other RNA
tcatgtaggttgccgcacaga

SEQ ID NO: 2400 - RNA, 21 nt, synthetic construct
  source 1..21: mol_type = other RNA
tcattccccatcatgtaggtt

SEQ ID NO: 2401 - RNA, 21 nt, synthetic construct
  source 1..21: mol_type = other RNA
tccaaggactgagggccatgg

SEQ ID NO: 2402 - RNA, 21 nt, synthetic construct
  source 1..21: mol_type = other RNA
tccaccttgcagatgtagagt

SEQ ID NO: 2403 - RNA, 21 nt, synthetic construct
  source 1..21: mol_type = other RNA
tccactggaggtgcccgtgca

SEQ ID NO: 2404 - RNA, 21 nt, synthetic construct
  source 1..21: mol_type = other RNA
tccaggcaaagccactgaggt

SEQ ID NO: 2405 - RNA, 21 nt, synthetic construct
  source 1..21: mol_type = other RNA
tccagtggaaatcaagtgaac

SEQ ID NO: 2406 - RNA, 21 nt, synthetic construct
  source 1..21: mol_type = other RNA
tccatctgcacgggcacctcc

SEQ ID NO: 2407 - RNA, 21 nt, synthetic construct
  source 1..21: mol_type = other RNA
tccatgctagcaatgcacgtg

SEQ ID NO: 2408 - RNA, 21 nt, synthetic construct
  source 1..21: mol_type = other RNA
tccatggccctcagtccttgg

SEQ ID NO: 2409 - RNA, 21 nt, synthetic construct
  source 1..21: mol_type = other RNA
tccccatcatgtaggttgccg

SEQ ID NO: 2410 - RNA, 21 nt, synthetic construct
  source 1..21: mol_type = other RNA
tcccgtgtccatggccctcag

SEQ ID NO: 2411 - RNA, 21 nt, synthetic construct
  source 1..21: mol_type = other RNA
tccctttggcttttccatgct

SEQ ID NO: 2412 - RNA, 21 nt, synthetic construct
  source 1..21: mol_type = other RNA
tccgggtgacagtgcttcggc

SEQ ID NO: 2413 - RNA, 21 nt, synthetic construct
  source 1..21: mol_type = other RNA
tccgttgcctatgcccaggta

SEQ ID NO: 2414 - RNA, 21 nt, synthetic construct
  source 1..21: mol_type = other RNA
tcctagatgattccatctgca

SEQ ID NO: 2415 - RNA, 21 nt, synthetic construct
  source 1..21: mol_type = other RNA
tccttggatagtgaggttcac

SEQ ID NO: 2416 - RNA, 21 nt, synthetic construct
  source 1..21: mol_type = other RNA
tcgccagctttgtgtgtgagt

SEQ ID NO: 2417 - RNA, 21 nt, synthetic construct
  source 1..21: mol_type = other RNA
tcggcaggctgacagccaggt

SEQ ID NO: 2418 - RNA, 21 nt, synthetic construct
  source 1..21: mol_type = other RNA
tcggctgctggccagtaccac

SEQ ID NO: 2419 - RNA, 21 nt, synthetic construct
  source 1..21: mol_type = other RNA
tctacatctgcaaggtggagc

SEQ ID NO: 2420 - RNA, 21 nt, synthetic construct
  source 1..21: mol_type = other RNA
tctaggaaggtcaactcattc

SEQ ID NO: 2421 - RNA, 21 nt, synthetic construct
  source 1..21: mol_type = other RNA
tctccaggcaaagccactgag

SEQ ID NO: 2422 - RNA, 21 nt, synthetic construct
  source 1..21: mol_type = other RNA
tctgcaaggtggagctcatgt

SEQ ID NO: 2423 - RNA, 21 nt, synthetic construct
  source 1..21: mol_type = other RNA
tctgcacgggcacctccagtg

SEQ ID NO: 2424 - RNA, 21 nt, synthetic construct
  source 1..21: mol_type = other RNA
tctgggttccgttgcctatgc

SEQ ID NO: 2425 - RNA, 21 nt, synthetic construct
  source 1..21: mol_type = other RNA
tctgtgcggcaacctacatga

SEQ ID NO: 2426 - RNA, 21 nt, synthetic construct
  source 1..21: mol_type = other RNA
tgaaatggctttgctcaccaa

SEQ ID NO: 2427 - RNA, 21 nt, synthetic construct
  source 1..21: mol_type = other RNA
tgaacctcactatccaaggac

SEQ ID NO: 2428 - RNA, 21 nt, synthetic construct
  source 1..21: mol_type = other RNA
tgaagtctgtgcggcaaccta

SEQ ID NO: 2429 - RNA, 21 nt, synthetic construct
  source 1..21: mol_type = other RNA
tgacagccaggtgactgaagt

SEQ ID NO: 2430 - RNA, 21 nt, synthetic construct
  source 1..21: mol_type = other RNA
tgacagtgcttcggcaggctg

SEQ ID NO: 2431 - RNA, 21 nt, synthetic construct
  source 1..21: mol_type = other RNA
tgaccttcctagatgattcca

SEQ ID NO: 2432 - RNA, 21 nt, synthetic construct
  source 1..21: mol_type = other RNA
tgactgaagtctgtgcggcaa

SEQ ID NO: 2433 - RNA, 21 nt, synthetic construct
  source 1..21: mol_type = other RNA
tgagcaaagccatttcactga

SEQ ID NO: 2434 - RNA, 21 nt, synthetic construct
  source 1..21: mol_type = other RNA
tgagctccaccttgcagatgt

SEQ ID NO: 2435 - RNA, 21 nt, synthetic construct
  source 1..21: mol_type = other RNA
tgagggccatggacacgggac

SEQ ID NO: 2436 - RNA, 21 nt, synthetic construct
  source 1..21: mol_type = other RNA
tgaggtccgggtgacagtgct

SEQ ID NO: 2437 - RNA, 21 nt, synthetic construct
  source 1..21: mol_type = other RNA
tgaggttcacttgatttccac

SEQ ID NO: 2438 - RNA, 21 nt, synthetic construct
  source 1..21: mol_type = other RNA
tgagtatgcatctccaggcaa

SEQ ID NO: 2439 - RNA, 21 nt, synthetic construct
  source 1..21: mol_type = other RNA
tgagttcactgagttcccttt

SEQ ID NO: 2440 - RNA, 21 nt, synthetic construct
  source 1..21: mol_type = other RNA
tgagttccctttggcttttcc

SEQ ID NO: 2441 - RNA, 21 nt, synthetic construct
  source 1..21: mol_type = other RNA
tgagttgaccttcctagatga

SEQ ID NO: 2442 - RNA, 21 nt, synthetic construct
  source 1..21: mol_type = other RNA
tgatggggaatgagttgacct

SEQ ID NO: 2443 - RNA, 21 nt, synthetic construct
  source 1..21: mol_type = other RNA
tgattccatctgcacgggcac

SEQ ID NO: 2444 - RNA, 21 nt, synthetic construct
  source 1..21: mol_type = other RNA
tgatttccactggaggtgccc

SEQ ID NO: 2445 - RNA, 21 nt, synthetic construct
  source 1..21: mol_type = other RNA
tgcaacaggtgtcaactcagt

SEQ ID NO: 2446 - RNA, 21 nt, synthetic construct
  source 1..21: mol_type = other RNA
tgcaaggtggagctcatgtac

SEQ ID NO: 2447 - RNA, 21 nt, synthetic construct
  source 1..21: mol_type = other RNA
tgcacgggcacctccagtgga

SEQ ID NO: 2448 - RNA, 21 nt, synthetic construct
  source 1..21: mol_type = other RNA
tgcacgtggcccagcctgctg

SEQ ID NO: 2449 - RNA, 21 nt, synthetic construct
  source 1..21: mol_type = other RNA
tgcagatggaatcatctagga

SEQ ID NO: 2450 - RNA, 21 nt, synthetic construct
  source 1..21: mol_type = other RNA
tgcagatgtagagtcccgtgt

SEQ ID NO: 2451 - RNA, 21 nt, synthetic construct
  source 1..21: mol_type = other RNA
tgcatactcacacacaaagct

SEQ ID NO: 2452 - RNA, 21 nt, synthetic construct
  source 1..21: mol_type = other RNA
tgcatctccaggcaaagccac

SEQ ID NO: 2453 - RNA, 21 nt, synthetic construct
  source 1..21: mol_type = other RNA
tgcattgctagcatggaaaag

SEQ ID NO: 2454 - RNA, 21 nt, synthetic construct
  source 1..21: mol_type = other RNA
tgcccaggtagtatggcggtg

SEQ ID NO: 2455 - RNA, 21 nt, synthetic construct
  source 1..21: mol_type = other RNA
tgcccgtgcagatggaatcat

SEQ ID NO: 2456 - RNA, 21 nt, synthetic construct
  source 1..21: mol_type = other RNA
tgccgaagcactgtcacccgg

SEQ ID NO: 2457 - RNA, 21 nt, synthetic construct
  source 1..21: mol_type = other RNA
tgccgcacagacttcagtcac

SEQ ID NO: 2458 - RNA, 21 nt, synthetic construct
  source 1..21: mol_type = other RNA
tgcctatgcccaggtagtatg

SEQ ID NO: 2459 - RNA, 21 nt, synthetic construct
  source 1..21: mol_type = other RNA
tgcctcggctgctggccagta

SEQ ID NO: 2460 - RNA, 21 nt, synthetic construct
  source 1..21: mol_type = other RNA
tgcctggagatgcatactcac

SEQ ID NO: 2461 - RNA, 21 nt, synthetic construct
  source 1..21: mol_type = other RNA
tgcggcaacctacatgatggg

SEQ ID NO: 2462 - RNA, 21 nt, synthetic construct
  source 1..21: mol_type = other RNA
tgctagcaatgcacgtggccc

SEQ ID NO: 2463 - RNA, 21 nt, synthetic construct
  source 1..21: mol_type = other RNA
tgctagcatggaaaagccaaa

SEQ ID NO: 2464 - RNA, 21 nt, synthetic construct
  source 1..21: mol_type = other RNA
tgctcaccaattacataaatc

SEQ ID NO: 2465 - RNA, 21 nt, synthetic construct
  source 1..21: mol_type = other RNA
tgctggccagtaccacagcag

SEQ ID NO: 2466 - RNA, 21 nt, synthetic construct
  source 1..21: mol_type = other RNA
tgctgtggtactggccagcag

SEQ ID NO: 2467 - RNA, 21 nt, synthetic construct
  source 1..21: mol_type = other RNA
tgcttcggcaggctgacagcc

SEQ ID NO: 2468 - RNA, 21 nt, synthetic construct
  source 1..21: mol_type = other RNA
tggaaaagccaaagggaactc

SEQ ID NO: 2469 - RNA, 21 nt, synthetic construct
  source 1..21: mol_type = other RNA
tggaaatcaagtgaacctcac

SEQ ID NO: 2470 - RNA, 21 nt, synthetic construct
  source 1..21: mol_type = other RNA
tggaatcatctaggaaggtca

SEQ ID NO: 2471 - RNA, 21 nt, synthetic construct
  source 1..21: mol_type = other RNA
tggacacgggactctacatct

SEQ ID NO: 2472 - RNA, 21 nt, synthetic construct
  source 1..21: mol_type = other RNA
tggagatgcatactcacacac

SEQ ID NO: 2473 - RNA, 21 nt, synthetic construct
  source 1..21: mol_type = other RNA
tggagctcatgtacccaccgc

SEQ ID NO: 2474 - RNA, 21 nt, synthetic construct
  source 1..21: mol_type = other RNA
tggaggtgcccgtgcagatgg

SEQ ID NO: 2475 - RNA, 21 nt, synthetic construct
  source 1..21: mol_type = other RNA
tggatagtgaggttcacttga

SEQ ID NO: 2476 - RNA, 21 nt, synthetic construct
  source 1..21: mol_type = other RNA
tggccagcagccgaggcatcg

SEQ ID NO: 2477 - RNA, 21 nt, synthetic construct
  source 1..21: mol_type = other RNA
tggccagtaccacagcaggct

SEQ ID NO: 2478 - RNA, 21 nt, synthetic construct
  source 1..21: mol_type = other RNA
tggcccagcctgctgtggtac

SEQ ID NO: 2479 - RNA, 21 nt, synthetic construct
  source 1..21: mol_type = other RNA
tggccctcagtccttggatag

SEQ ID NO: 2480 - RNA, 21 nt, synthetic construct
  source 1..21: mol_type = other RNA
tggcgatgcctcggctgctgg

SEQ ID NO: 2481 - RNA, 21 nt, synthetic construct
  source 1..21: mol_type = other RNA
tggcggtgggtacatgagctc

SEQ ID NO: 2482 - RNA, 21 nt, synthetic construct
  source 1..21: mol_type = other RNA
tggctgtcagcctgccgaagc

SEQ ID NO: 2483 - RNA, 21 nt, synthetic construct
  source 1..21: mol_type = other RNA
tggctttgcctggagatgcat

SEQ ID NO: 2484 - RNA, 21 nt, synthetic construct
  source 1..21: mol_type = other RNA
tggctttgctcaccaattaca

SEQ ID NO: 2485 - RNA, 21 nt, synthetic construct
  source 1..21: mol_type = other RNA
tggcttttccatgctagcaat

SEQ ID NO: 2486 - RNA, 21 nt, synthetic construct
  source 1..21: mol_type = other RNA
tgggcataggcaacggaaccc

SEQ ID NO: 2487 - RNA, 21 nt, synthetic construct
  source 1..21: mol_type = other RNA
tgggccacgtgcattgctagc

SEQ ID NO: 2488 - RNA, 21 nt, synthetic construct
  source 1..21: mol_type = other RNA
tggggaatgagttgaccttcc

SEQ ID NO: 2489 - RNA, 21 nt, synthetic construct
  source 1..21: mol_type = other RNA
tgggtacatgagctccacctt

SEQ ID NO: 2490 - RNA, 21 nt, synthetic construct
  source 1..21: mol_type = other RNA
tgggttccgttgcctatgccc

SEQ ID NO: 2491 - RNA, 21 nt, synthetic construct
  source 1..21: mol_type = other RNA
tggtactggccagcagccgag

SEQ ID NO: 2492 - RNA, 21 nt, synthetic construct
  source 1..21: mol_type = other RNA
tggtgagcaaagccatttcac

SEQ ID NO: 2493 - RNA, 21 nt, synthetic construct
  source 1..21: mol_type = other RNA
tgtaattggtgagcaaagcca

SEQ ID NO: 2494 - RNA, 21 nt, synthetic construct
  source 1..21: mol_type = other RNA
tgtacccaccgccatactacc

SEQ ID NO: 2495 - RNA, 21 nt, synthetic construct
  source 1..21: mol_type = other RNA
tgtagagtcccgtgtccatgg

SEQ ID NO: 2496 - RNA, 21 nt, synthetic construct
  source 1..21: mol_type = other RNA
tgtaggttgccgcacagactt

SEQ ID NO: 2497 - RNA, 21 nt, synthetic construct
  source 1..21: mol_type = other RNA
tgtcaactcagtgaaatggct

SEQ ID NO: 2498 - RNA, 21 nt, synthetic construct
  source 1..21: mol_type = other RNA
tgtcacccggacctcagtggc

SEQ ID NO: 2499 - RNA, 21 nt, synthetic construct
  source 1..21: mol_type = other RNA
tgtcagcctgccgaagcactg

SEQ ID NO: 2500 - RNA, 21 nt, synthetic construct
  source 1..21: mol_type = other RNA
tgtccatggccctcagtcctt

SEQ ID NO: 2501 - RNA, 21 nt, synthetic construct
  source 1..21: mol_type = other RNA
tgtgagtatgcatctccaggc

SEQ ID NO: 2502 - RNA, 21 nt, synthetic construct
  source 1..21: mol_type = other RNA
tgtgcggcaacctacatgatg

SEQ ID NO: 2503 - RNA, 21 nt, synthetic construct
  source 1..21: mol_type = other RNA
tgtggtactggccagcagccg

SEQ ID NO: 2504 - RNA, 21 nt, synthetic construct
  source 1..21: mol_type = other RNA
tgtgtgagtatgcatctccag

SEQ ID NO: 2505 - RNA, 21 nt, synthetic construct
  source 1..21: mol_type = other RNA
tgtgtgtgagtatgcatctcc

SEQ ID NO: 2506 - RNA, 21 nt, synthetic construct
  source 1..21: mol_type = other RNA
ttacataaatctgggttccgt

SEQ ID NO: 2507 - RNA, 21 nt, synthetic construct
  source 1..21: mol_type = other RNA
ttatgtaattggtgagcaaag

SEQ ID NO: 2508 - RNA, 21 nt, synthetic construct
  source 1..21: mol_type = other RNA
ttcactgagttccctttggct

SEQ ID NO: 2509 - RNA, 21 nt, synthetic construct
  source 1..21: mol_type = other RNA
ttcacttgatttccactggag

SEQ ID NO: 2510 - RNA, 21 nt, synthetic construct
  source 1..21: mol_type = other RNA
ttcagtcacctggctgtcagc

SEQ ID NO: 2511 - RNA, 21 nt, synthetic construct
  source 1..21: mol_type = other RNA
ttccactggaggtgcccgtgc

SEQ ID NO: 2512 - RNA, 21 nt, synthetic construct
  source 1..21: mol_type = other RNA
ttccatctgcacgggcacctc

SEQ ID NO: 2513 - RNA, 21 nt, synthetic construct
  source 1..21: mol_type = other RNA
ttccatgctagcaatgcacgt

SEQ ID NO: 2514 - RNA, 21 nt, synthetic construct
  source 1..21: mol_type = other RNA
ttccccatcatgtaggttgcc

SEQ ID NO: 2515 - RNA, 21 nt, synthetic construct
  source 1..21: mol_type = other RNA
ttccctttggcttttccatgc

SEQ ID NO: 2516 - RNA, 21 nt, synthetic construct
  source 1..21: mol_type = other RNA
ttccgttgcctatgcccaggt

SEQ ID NO: 2517 - RNA, 21 nt, synthetic construct
  source 1..21: mol_type = other RNA
ttcctagatgattccatctgc

SEQ ID NO: 2518 - RNA, 21 nt, synthetic construct
  source 1..21: mol_type = other RNA
ttcggcaggctgacagccagg

SEQ ID NO: 2519 - RNA, 21 nt, synthetic construct
  source 1..21: mol_type = other RNA
ttgaccttcctagatgattcc

SEQ ID NO: 2520 - RNA, 21 nt, synthetic construct
  source 1..21: mol_type = other RNA
ttgatttccactggaggtgcc

SEQ ID NO: 2521 - RNA, 21 nt, synthetic construct
  source 1..21: mol_type = other RNA
ttgcagatgtagagtcccgtg

SEQ ID NO: 2522 - RNA, 21 nt, synthetic construct
  source 1..21: mol_type = other RNA
ttgccgcacagacttcagtca

SEQ ID NO: 2523 - RNA, 21 nt, synthetic construct
  source 1..21: mol_type = other RNA
ttgcctatgcccaggtagtat

SEQ ID NO: 2524 - RNA, 21 nt, synthetic construct
  source 1..21: mol_type = other RNA
ttgcctggagatgcatactca

SEQ ID NO: 2525 - RNA, 21 nt, synthetic construct
  source 1..21: mol_type = other RNA
ttgctagcatggaaaagccaa

SEQ ID NO: 2526 - RNA, 21 nt, synthetic construct
  source 1..21: mol_type = other RNA
ttgctcaccaattacataaat

SEQ ID NO: 2527 - RNA, 21 nt, synthetic construct
  source 1..21: mol_type = other RNA
ttggatagtgaggttcacttg

SEQ ID NO: 2528 - RNA, 21 nt, synthetic construct
  source 1..21: mol_type = other RNA
ttggcttttccatgctagcaa

SEQ ID NO: 2529 - RNA, 21 nt, synthetic construct
  source 1..21: mol_type = other RNA
ttggtgagcaaagccatttca

SEQ ID NO: 2530 - RNA, 21 nt, synthetic construct
  source 1..21: mol_type = other RNA
ttgtgtgtgagtatgcatctc

SEQ ID NO: 2531 - RNA, 21 nt, synthetic construct
  source 1..21: mol_type = other RNA
tttatgtaattggtgagcaaa

SEQ ID NO: 2532 - RNA, 21 nt, synthetic construct
  source 1..21: mol_type = other RNA
tttccactggaggtgcccgtg

SEQ ID NO: 2533 - RNA, 21 nt, synthetic construct
  source 1..21: mol_type = other RNA
tttccatgctagcaatgcacg

SEQ ID NO: 2534 - RNA, 21 nt, synthetic construct
  source 1..21: mol_type = other RNA
tttgcctggagatgcatactc

SEQ ID NO: 2535 - RNA, 21 nt, synthetic construct
  source 1..21: mol_type = other RNA
tttgctcaccaattacataaa

SEQ ID NO: 2536 - RNA, 21 nt, synthetic construct
  source 1..21: mol_type = other RNA
tttggcttttccatgctagca

SEQ ID NO: 2537 - RNA, 21 nt, synthetic construct
  source 1..21: mol_type = other RNA
tttgtgtgtgagtatgcatct

SEQ ID NO: 2538 - RNA, 21 nt, synthetic construct
  source 1..21: mol_type = other RNA
ttttccatgctagcaatgcac

SEQ ID NO: 2539 - RNA, 22 nt, synthetic construct
  source 1..22: mol_type = other RNA
aaaagccaaagggaactcagtg

SEQ ID NO: 2540 - RNA, 22 nt, synthetic construct
  source 1..22: mol_type = other RNA
aaagccactgaggtccgggtga

SEQ ID NO: 2541 - RNA, 22 nt, synthetic construct
  source 1..22: mol_type = other RNA
aaagccatttcactgagttgac

SEQ ID NO: 2542 - RNA, 22 nt, synthetic construct
  source 1..22: mol_type = other RNA
aaagctggcgatgcctcggctg

SEQ ID NO: 2543 - RNA, 22 nt, synthetic construct
  source 1..22: mol_type = other RNA
aaatcaagtgaacctcactatc

SEQ ID NO: 2544 - RNA, 22 nt, synthetic construct
  source 1..22: mol_type = other RNA
aaatctgggttccgttgcctat

SEQ ID NO: 2545 - RNA, 22 nt, synthetic construct
  source 1..22: mol_type = other RNA
aaatggctttgctcaccaatta

SEQ ID NO: 2546 - RNA, 22 nt, synthetic construct
  source 1..22: mol_type = other RNA
aacaggtgtcaactcagtgaaa

SEQ ID NO: 2547 - RNA, 22 nt, synthetic construct
  source 1..22: mol_type = other RNA
aacccagatttatgtaattggt

SEQ ID NO: 2548 - RNA, 22 nt, synthetic construct
  source 1..22: mol_type = other RNA
aacctacatgatggggaatgag

SEQ ID NO: 2549 - RNA, 22 nt, synthetic construct
  source 1..22: mol_type = other RNA
aacctcactatccaaggactga

SEQ ID NO: 2550 - RNA, 22 nt, synthetic construct
  source 1..22: mol_type = other RNA
aacggaacccagatttatgtaa

SEQ ID NO: 2551 - RNA, 22 nt, synthetic construct
  source 1..22: mol_type = other RNA
aactcagtgaaatggctttgct

SEQ ID NO: 2552 - RNA, 22 nt, synthetic construct
  source 1..22: mol_type = other RNA
aactcattccccatcatgtagg

SEQ ID NO: 2553 - RNA, 22 nt, synthetic construct
  source 1..22: mol_type = other RNA
aagcactgtcacccggacctca

SEQ ID NO: 2554 - RNA, 22 nt, synthetic construct
  source 1..22: mol_type = other RNA
aagccactgaggtccgggtgac

SEQ ID NO: 2555 - RNA, 22 nt, synthetic construct
  source 1..22: mol_type = other RNA
aagccatttcactgagttgaca

SEQ ID NO: 2556 - RNA, 22 nt, synthetic construct
  source 1..22: mol_type = other RNA
aagctggcgatgcctcggctgc

SEQ ID NO: 2557 - RNA, 22 nt, synthetic construct
  source 1..22: mol_type = other RNA
aaggactgagggccatggacac

SEQ ID NO: 2558 - RNA, 22 nt, synthetic construct
  source 1..22: mol_type = other RNA
aaggtcaactcattccccatca

SEQ ID NO: 2559 - RNA, 22 nt, synthetic construct
  source 1..22: mol_type = other RNA
aaggtggagctcatgtacccac

SEQ ID NO: 2560 - RNA, 22 nt, synthetic construct
  source 1..22: mol_type = other RNA
aagtctgtgcggcaacctacat

SEQ ID NO: 2561 - RNA, 22 nt, synthetic construct
  source 1..22: mol_type = other RNA
aagtgaacctcactatccaagg

SEQ ID NO: 2562 - RNA, 22 nt, synthetic construct
  source 1..22: mol_type = other RNA
aatcaagtgaacctcactatcc

SEQ ID NO: 2563 - RNA, 22 nt, synthetic construct
  source 1..22: mol_type = other RNA
aatcatctaggaaggtcaactc

SEQ ID NO: 2564 - RNA, 22 nt, synthetic construct
  source 1..22: mol_type = other RNA
aatctgggttccgttgcctatg

SEQ ID NO: 2565 - RNA, 22 nt, synthetic construct
  source 1..22: mol_type = other RNA
aatgagttgaccttcctagatg

SEQ ID NO: 2566 - RNA, 22 nt, synthetic construct
  source 1..22: mol_type = other RNA
aatgcacgtggcccagcctgct

SEQ ID NO: 2567 - RNA, 22 nt, synthetic construct
  source 1..22: mol_type = other RNA
aatggctttgctcaccaattac

SEQ ID NO: 2568 - RNA, 22 nt, synthetic construct
  source 1..22: mol_type = other RNA
aattacataaatctgggttccg

SEQ ID NO: 2569 - RNA, 22 nt, synthetic construct
  source 1..22: mol_type = other RNA
aattggtgagcaaagccatttc

SEQ ID NO: 2570 - RNA, 22 nt, synthetic construct
  source 1..22: mol_type = other RNA
acaaagctggcgatgcctcggc

SEQ ID NO: 2571 - RNA, 22 nt, synthetic construct
  source 1..22: mol_type = other RNA
acacaaagctggcgatgcctcg

SEQ ID NO: 2572 - RNA, 22 nt, synthetic construct
  source 1..22: mol_type = other RNA
acacacaaagctggcgatgcct

SEQ ID NO: 2573 - RNA, 22 nt, synthetic construct
  source 1..22: mol_type = other RNA
acacgggactctacatctgcaa

SEQ ID NO: 2574 - RNA, 22 nt, synthetic construct
  source 1..22: mol_type = other RNA
acagacttcagtcacctggctg

SEQ ID NO: 2575 - RNA, 22 nt, synthetic construct
  source 1..22: mol_type = other RNA
acagcaggctgggccacgtgca

SEQ ID NO: 2576 - RNA, 22 nt, synthetic construct
  source 1..22: mol_type = other RNA
acagccaggtgactgaagtctg

SEQ ID NO: 2577 - RNA, 22 nt, synthetic construct
  source 1..22: mol_type = other RNA
acaggtgtcaactcagtgaaat

SEQ ID NO: 2578 - RNA, 22 nt, synthetic construct
  source 1..22: mol_type = other RNA
acagtgcttcggcaggctgaca

SEQ ID NO: 2579 - RNA, 22 nt, synthetic construct
  source 1..22: mol_type = other RNA
acataaatctgggttccgttgc

SEQ ID NO: 2580 - RNA, 22 nt, synthetic construct
  source 1..22: mol_type = other RNA
acatctgcaaggtggagctcat

SEQ ID NO: 2581 - RNA, 22 nt, synthetic construct
  source 1..22: mol_type = other RNA
acatgagctccaccttgcagat

SEQ ID NO: 2582 - RNA, 22 nt, synthetic construct
  source 1..22: mol_type = other RNA
acatgatggggaatgagttgac

SEQ ID NO: 2583 - RNA, 22 nt, synthetic construct
  source 1..22: mol_type = other RNA
accaattacataaatctgggtt

SEQ ID NO: 2584 - RNA, 22 nt, synthetic construct
  source 1..22: mol_type = other RNA
accacagcaggctgggccacgt

SEQ ID NO: 2585 - RNA, 22 nt, synthetic construct
  source 1..22: mol_type = other RNA
acccaccgccatactacctggg

SEQ ID NO: 2586 - RNA, 22 nt, synthetic construct
  source 1..22: mol_type = other RNA
acccagatttatgtaattggtg

SEQ ID NO: 2587 - RNA, 22 nt, synthetic construct
  source 1..22: mol_type = other RNA
acccggacctcagtggctttgc

SEQ ID NO: 2588 - RNA, 22 nt, synthetic construct
  source 1..22: mol_type = other RNA
accgccatactacctgggcata

SEQ ID NO: 2589 - RNA, 22 nt, synthetic construct
  source 1..22: mol_type = other RNA
acctacatgatggggaatgagt

SEQ ID NO: 2590 - RNA, 22 nt, synthetic construct
  source 1..22: mol_type = other RNA
acctcactatccaaggactgag

SEQ ID NO: 2591 - RNA, 22 nt, synthetic construct
  source 1..22: mol_type = other RNA
acctcagtggctttgcctggag

SEQ ID NO: 2592 - RNA, 22 nt, synthetic construct
  source 1..22: mol_type = other RNA
acctccagtggaaatcaagtga

SEQ ID NO: 2593 - RNA, 22 nt, synthetic construct
  source 1..22: mol_type = other RNA
acctggctgtcagcctgccgaa

SEQ ID NO: 2594 - RNA, 22 nt, synthetic construct
  source 1..22: mol_type = other RNA
acctgggcataggcaacggaac

SEQ ID NO: 2595 - RNA, 22 nt, synthetic construct
  source 1..22: mol_type = other RNA
accttcctagatgattccatct

SEQ ID NO: 2596 - RNA, 22 nt, synthetic construct
  source 1..22: mol_type = other RNA
accttgcagatgtagagtcccg

SEQ ID NO: 2597 - RNA, 22 nt, synthetic construct
  source 1..22: mol_type = other RNA
acggaacccagatttatgtaat

SEQ ID NO: 2598 - RNA, 22 nt, synthetic construct
  source 1..22: mol_type = other RNA
acgggactctacatctgcaagg

SEQ ID NO: 2599 - RNA, 22 nt, synthetic construct
  source 1..22: mol_type = other RNA
acgggcacctccagtggaaatc

SEQ ID NO: 2600 - RNA, 22 nt, synthetic construct
  source 1..22: mol_type = other RNA
acgtgcattgctagcatggaaa

SEQ ID NO: 2601 - RNA, 22 nt, synthetic construct
  source 1..22: mol_type = other RNA
acgtggcccagcctgctgtggt

SEQ ID NO: 2602 - RNA, 22 nt, synthetic construct
  source 1..22: mol_type = other RNA
actacctgggcataggcaacgg

SEQ ID NO: 2603 - RNA, 22 nt, synthetic construct
  source 1..22: mol_type = other RNA
actatccaaggactgagggcca

SEQ ID NO: 2604 - RNA, 22 nt, synthetic construct
  source 1..22: mol_type = other RNA
actcacacacaaagctggcgat

SEQ ID NO: 2605 - RNA, 22 nt, synthetic construct
  source 1..22: mol_type = other RNA
actcagtgaaatggctttgctc

SEQ ID NO: 2606 - RNA, 22 nt, synthetic construct
  source 1..22: mol_type = other RNA
actcattccccatcatgtaggt

SEQ ID NO: 2607 - RNA, 22 nt, synthetic construct
  source 1..22: mol_type = other RNA
actctacatctgcaaggtggag

SEQ ID NO: 2608 - RNA, 22 nt, synthetic construct
  source 1..22: mol_type = other RNA
actgaagtctgtgcggcaacct

SEQ ID NO: 2609 - RNA, 22 nt, synthetic construct
  source 1..22: mol_type = other RNA
actgagggccatggacacggga

SEQ ID NO: 2610 - RNA, 22 nt, synthetic construct
  source 1..22: mol_type = other RNA
actgaggtccgggtgacagtgc

SEQ ID NO: 2611 - RNA, 22 nt, synthetic construct
  source 1..22: mol_type = other RNA
actgagttccctttggcttttc

SEQ ID NO: 2612 - RNA, 22 nt, synthetic construct
  source 1..22: mol_type = other RNA
actggaggtgcccgtgcagatg

SEQ ID NO: 2613 - RNA, 22 nt, synthetic construct
  source 1..22: mol_type = other RNA
actggccagcagccgaggcatc

SEQ ID NO: 2614 - RNA, 22 nt, synthetic construct
  source 1..22: mol_type = other RNA
actgtcacccggacctcagtgg

SEQ ID NO: 2615 - RNA, 22 nt, synthetic construct
  source 1..22: mol_type = other RNA
acttcagtcacctggctgtcag

SEQ ID NO: 2616 - RNA, 22 nt, synthetic construct
  source 1..22: mol_type = other RNA
acttgatttccactggaggtgc

SEQ ID NO: 2617 - RNA, 22 nt, synthetic construct
  source 1..22: mol_type = other RNA
agacttcagtcacctggctgtc

SEQ ID NO: 2618 - RNA, 22 nt, synthetic construct
  source 1..22: mol_type = other RNA
agagtcccgtgtccatggccct

SEQ ID NO: 2619 - RNA, 22 nt, synthetic construct
  source 1..22: mol_type = other RNA
agatgattccatctgcacgggc

SEQ ID NO: 2620 - RNA, 22 nt, synthetic construct
  source 1..22: mol_type = other RNA
agatgcatactcacacacaaag

SEQ ID NO: 2621 - RNA, 22 nt, synthetic construct
  source 1..22: mol_type = other RNA
agatggaatcatctaggaaggt

SEQ ID NO: 2622 - RNA, 22 nt, synthetic construct
  source 1..22: mol_type = other RNA
agatgtagagtcccgtgtccat

SEQ ID NO: 2623 - RNA, 22 nt, synthetic construct
  source 1..22: mol_type = other RNA
agatttatgtaattggtgagca

SEQ ID NO: 2624 - RNA, 22 nt, synthetic construct
  source 1..22: mol_type = other RNA
agcaaagccatttcactgagtt

SEQ ID NO: 2625 - RNA, 22 nt, synthetic construct
  source 1..22: mol_type = other RNA
agcaatgcacgtggcccagcct

SEQ ID NO: 2626 - RNA, 22 nt, synthetic construct
  source 1..22: mol_type = other RNA
agcactgtcacccggacctcag

SEQ ID NO: 2627 - RNA, 22 nt, synthetic construct
  source 1..22: mol_type = other RNA
agcagccgaggcatcgccagct

SEQ ID NO: 2628 - RNA, 22 nt, synthetic construct
  source 1..22: mol_type = other RNA
agcaggctgggccacgtgcatt

SEQ ID NO: 2629 - RNA, 22 nt, synthetic construct
  source 1..22: mol_type = other RNA
agcatggaaaagccaaagggaa

SEQ ID NO: 2630 - RNA, 22 nt, synthetic construct
  source 1..22: mol_type = other RNA
agccactgaggtccgggtgaca

SEQ ID NO: 2631 - RNA, 22 nt, synthetic construct
  source 1..22: mol_type = other RNA
agccaggtgactgaagtctgtg

SEQ ID NO: 2632 - RNA, 22 nt, synthetic construct
  source 1..22: mol_type = other RNA
agccatttcactgagttgacac

SEQ ID NO: 2633 - RNA, 22 nt, synthetic construct
  source 1..22: mol_type = other RNA
agccgaggcatcgccagctttg

SEQ ID NO: 2634 - RNA, 22 nt, synthetic construct
  source 1..22: mol_type = other RNA
agcctgccgaagcactgtcacc

SEQ ID NO: 2635 - RNA, 22 nt, synthetic construct
  source 1..22: mol_type = other RNA
agcctgctgtggtactggccag

SEQ ID NO: 2636 - RNA, 22 nt, synthetic construct
  source 1..22: mol_type = other RNA
agctcatgtacccaccgccata

SEQ ID NO: 2637 - RNA, 22 nt, synthetic construct
  source 1..22: mol_type = other RNA
agctccaccttgcagatgtaga

SEQ ID NO: 2638 - RNA, 22 nt, synthetic construct
  source 1..22: mol_type = other RNA
agctggcgatgcctcggctgct

SEQ ID NO: 2639 - RNA, 22 nt, synthetic construct
  source 1..22: mol_type = other RNA
agctttgtgtgtgagtatgcat

SEQ ID NO: 2640 - RNA, 22 nt, synthetic construct
  source 1..22: mol_type = other RNA
aggaaggtcaactcattcccca

SEQ ID NO: 2641 - RNA, 22 nt, synthetic construct
  source 1..22: mol_type = other RNA
aggactgagggccatggacacg

SEQ ID NO: 2642 - RNA, 22 nt, synthetic construct
  source 1..22: mol_type = other RNA
aggcaaagccactgaggtccgg

SEQ ID NO: 2643 - RNA, 22 nt, synthetic construct
  source 1..22: mol_type = other RNA
aggcaacggaacccagatttat

SEQ ID NO: 2644 - RNA, 22 nt, synthetic construct
  source 1..22: mol_type = other RNA
aggcatcgccagctttgtgtgt

SEQ ID NO: 2645 - RNA, 22 nt, synthetic construct
  source 1..22: mol_type = other RNA
aggctgacagccaggtgactga

SEQ ID NO: 2646 - RNA, 22 nt, synthetic construct
  source 1..22: mol_type = other RNA
aggctgggccacgtgcattgct

SEQ ID NO: 2647 - RNA, 22 nt, synthetic construct
  source 1..22: mol_type = other RNA
agggccatggacacgggactct

SEQ ID NO: 2648 - RNA, 22 nt, synthetic construct
  source 1..22: mol_type = other RNA
aggtagtatggcggtgggtaca

SEQ ID NO: 2649 - RNA, 22 nt, synthetic construct
  source 1..22: mol_type = other RNA
aggtcaactcattccccatcat

SEQ ID NO: 2650 - RNA, 22 nt, synthetic construct
  source 1..22: mol_type = other RNA
aggtccgggtgacagtgcttcg

SEQ ID NO: 2651 - RNA, 22 nt, synthetic construct
  source 1..22: mol_type = other RNA
aggtgactgaagtctgtgcggc

SEQ ID NO: 2652 - RNA, 22 nt, synthetic construct
  source 1..22: mol_type = other RNA
aggtgcccgtgcagatggaatc

SEQ ID NO: 2653 - RNA, 22 nt, synthetic construct
  source 1..22: mol_type = other RNA
aggtggagctcatgtacccacc

SEQ ID NO: 2654 - RNA, 22 nt, synthetic construct
  source 1..22: mol_type = other RNA
aggtgtcaactcagtgaaatgg

SEQ ID NO: 2655 - RNA, 22 nt, synthetic construct
  source 1..22: mol_type = other RNA
aggttcacttgatttccactgg

SEQ ID NO: 2656 - RNA, 22 nt, synthetic construct
  source 1..22: mol_type = other RNA
aggttgccgcacagacttcagt

SEQ ID NO: 2657 - RNA, 22 nt, synthetic construct
  source 1..22: mol_type = other RNA
agtaccacagcaggctgggcca

SEQ ID NO: 2658 - RNA, 22 nt, synthetic construct
  source 1..22: mol_type = other RNA
agtatgcatctccaggcaaagc

SEQ ID NO: 2659 - RNA, 22 nt, synthetic construct
  source 1..22: mol_type = other RNA
agtatggcggtgggtacatgag

SEQ ID NO: 2660 - RNA, 22 nt, synthetic construct
  source 1..22: mol_type = other RNA
agtcacctggctgtcagcctgc

SEQ ID NO: 2661 - RNA, 22 nt, synthetic construct
  source 1..22: mol_type = other RNA
agtcccgtgtccatggccctca

SEQ ID NO: 2662 - RNA, 22 nt, synthetic construct
  source 1..22: mol_type = other RNA
agtccttggatagtgaggttca

SEQ ID NO: 2663 - RNA, 22 nt, synthetic construct
  source 1..22: mol_type = other RNA
agtctgtgcggcaacctacatg

SEQ ID NO: 2664 - RNA, 22 nt, synthetic construct
  source 1..22: mol_type = other RNA
agtgaaatggctttgctcacca

SEQ ID NO: 2665 - RNA, 22 nt, synthetic construct
  source 1..22: mol_type = other RNA
agtgaacctcactatccaagga

SEQ ID NO: 2666 - RNA, 22 nt, synthetic construct
  source 1..22: mol_type = other RNA
agtgaggttcacttgatttcca

SEQ ID NO: 2667 - RNA, 22 nt, synthetic construct
  source 1..22: mol_type = other RNA
agtgcttcggcaggctgacagc

SEQ ID NO: 2668 - RNA, 22 nt, synthetic construct
  source 1..22: mol_type = other RNA
agtggaaatcaagtgaacctca

SEQ ID NO: 2669 - RNA, 22 nt, synthetic construct
  source 1..22: mol_type = other RNA
agtggctttgcctggagatgca

SEQ ID NO: 2670 - RNA, 22 nt, synthetic construct
  source 1..22: mol_type = other RNA
agttcactgagttccctttggc

SEQ ID NO: 2671 - RNA, 22 nt, synthetic construct
  source 1..22: mol_type = other RNA
agttccctttggcttttccatg

SEQ ID NO: 2672 - RNA, 22 nt, synthetic construct
  source 1..22: mol_type = other RNA
agttgaccttcctagatgattc

SEQ ID NO: 2673 - RNA, 22 nt, synthetic construct
  source 1..22: mol_type = other RNA
ataaatctgggttccgttgcct

SEQ ID NO: 2674 - RNA, 22 nt, synthetic construct
  source 1..22: mol_type = other RNA
atactacctgggcataggcaac

SEQ ID NO: 2675 - RNA, 22 nt, synthetic construct
  source 1..22: mol_type = other RNA
atactcacacacaaagctggcg

SEQ ID NO: 2676 - RNA, 22 nt, synthetic construct
  source 1..22: mol_type = other RNA
ataggcaacggaacccagattt

SEQ ID NO: 2677 - RNA, 22 nt, synthetic construct
  source 1..22: mol_type = other RNA
atagtgaggttcacttgatttc

SEQ ID NO: 2678 - RNA, 22 nt, synthetic construct
  source 1..22: mol_type = other RNA
atcaagtgaacctcactatcca

SEQ ID NO: 2679 - RNA, 22 nt, synthetic construct
  source 1..22: mol_type = other RNA
atcatctaggaaggtcaactca

SEQ ID NO: 2680 - RNA, 22 nt, synthetic construct
  source 1..22: mol_type = other RNA
atcatgtaggttgccgcacaga

SEQ ID NO: 2681 - RNA, 22 nt, synthetic construct
  source 1..22: mol_type = other RNA
atccaaggactgagggccatgg

SEQ ID NO: 2682 - RNA, 22 nt, synthetic construct
  source 1..22: mol_type = other RNA
atcgccagctttgtgtgtgagt

SEQ ID NO: 2683 - RNA, 22 nt, synthetic construct
  source 1..22: mol_type = other RNA
atctaggaaggtcaactcattc

SEQ ID NO: 2684 - RNA, 22 nt, synthetic construct
  source 1..22: mol_type = other RNA
atctccaggcaaagccactgag

SEQ ID NO: 2685 - RNA, 22 nt, synthetic construct
  source 1..22: mol_type = other RNA
atctgcaaggtggagctcatgt

SEQ ID NO: 2686 - RNA, 22 nt, synthetic construct
  source 1..22: mol_type = other RNA
atctgcacgggcacctccagtg

SEQ ID NO: 2687 - RNA, 22 nt, synthetic construct
  source 1..22: mol_type = other RNA
atctgggttccgttgcctatgc

SEQ ID NO: 2688 - RNA, 22 nt, synthetic construct
  source 1..22: mol_type = other RNA
atgagctccaccttgcagatgt

SEQ ID NO: 2689 - RNA, 22 nt, synthetic construct
  source 1..22: mol_type = other RNA
atgagttcactgagttcccttt

SEQ ID NO: 2690 - RNA, 22 nt, synthetic construct
  source 1..22: mol_type = other RNA
atgagttgaccttcctagatga

SEQ ID NO: 2691 - RNA, 22 nt, synthetic construct
  source 1..22: mol_type = other RNA
atgatggggaatgagttgacct

SEQ ID NO: 2692 - RNA, 22 nt, synthetic construct
  source 1..22: mol_type = other RNA
atgattccatctgcacgggcac

SEQ ID NO: 2693 - RNA, 22 nt, synthetic construct
  source 1..22: mol_type = other RNA
atgcacgtggcccagcctgctg

SEQ ID NO: 2694 - RNA, 22 nt, synthetic construct
  source 1..22: mol_type = other RNA
atgcatactcacacacaaagct

SEQ ID NO: 2695 - RNA, 22 nt, synthetic construct
  source 1..22: mol_type = other RNA
atgcatctccaggcaaagccac

SEQ ID NO: 2696 - RNA, 22 nt, synthetic construct
  source 1..22: mol_type = other RNA
atgcccaggtagtatggcggtg

SEQ ID NO: 2697 - RNA, 22 nt, synthetic construct
  source 1..22: mol_type = other RNA
atgcctcggctgctggccagta

SEQ ID NO: 2698 - RNA, 22 nt, synthetic construct
  source 1..22: mol_type = other RNA
atgctagcaatgcacgtggccc

SEQ ID NO: 2699 - RNA, 22 nt, synthetic construct
  source 1..22: mol_type = other RNA
atggaaaagccaaagggaactc

SEQ ID NO: 2700 - RNA, 22 nt, synthetic construct
  source 1..22: mol_type = other RNA
atggaatcatctaggaaggtca

SEQ ID NO: 2701 - RNA, 22 nt, synthetic construct
  source 1..22: mol_type = other RNA
atggacacgggactctacatct

SEQ ID NO: 2702 - RNA, 22 nt, synthetic construct
  source 1..22: mol_type = other RNA
atggccctcagtccttggatag

SEQ ID NO: 2703 - RNA, 22 nt, synthetic construct
  source 1..22: mol_type = other RNA
atggcggtgggtacatgagctc

SEQ ID NO: 2704 - RNA, 22 nt, synthetic construct
  source 1..22: mol_type = other RNA
atggctttgctcaccaattaca

SEQ ID NO: 2705 - RNA, 22 nt, synthetic construct
  source 1..22: mol_type = other RNA
atggggaatgagttgaccttcc

SEQ ID NO: 2706 - RNA, 22 nt, synthetic construct
  source 1..22: mol_type = other RNA
atgtaattggtgagcaaagcca

SEQ ID NO: 2707 - RNA, 22 nt, synthetic construct
  source 1..22: mol_type = other RNA
atgtacccaccgccatactacc

SEQ ID NO: 2708 - RNA, 22 nt, synthetic construct
  source 1..22: mol_type = other RNA
atgtagagtcccgtgtccatgg

SEQ ID NO: 2709 - RNA, 22 nt, synthetic construct
  source 1..22: mol_type = other RNA
atgtaggttgccgcacagactt

SEQ ID NO: 2710 - RNA, 22 nt, synthetic construct
  source 1..22: mol_type = other RNA
attacataaatctgggttccgt

SEQ ID NO: 2711 - RNA, 22 nt, synthetic construct
  source 1..22: mol_type = other RNA
attccatctgcacgggcacctc

SEQ ID NO: 2712 - RNA, 22 nt, synthetic construct
  source 1..22: mol_type = other RNA
attccccatcatgtaggttgcc

SEQ ID NO: 2713 - RNA, 22 nt, synthetic construct
  source 1..22: mol_type = other RNA
attgctagcatggaaaagccaa

SEQ ID NO: 2714 - RNA, 22 nt, synthetic construct
  source 1..22: mol_type = other RNA
attggtgagcaaagccatttca

SEQ ID NO: 2715 - RNA, 22 nt, synthetic construct
  source 1..22: mol_type = other RNA
atttatgtaattggtgagcaaa

SEQ ID NO: 2716 - RNA, 22 nt, synthetic construct
  source 1..22: mol_type = other RNA
atttccactggaggtgcccgtg

SEQ ID NO: 2717 - RNA, 22 nt, synthetic construct
  source 1..22: mol_type = other RNA
caaagccactgaggtccgggtg

SEQ ID NO: 2718 - RNA, 22 nt, synthetic construct
  source 1..22: mol_type = other RNA
caaagccatttcactgagttga

SEQ ID NO: 2719 - RNA, 22 nt, synthetic construct
  source 1..22: mol_type = other RNA
caaagctggcgatgcctcggct

SEQ ID NO: 2720 - RNA, 22 nt, synthetic construct
  source 1..22: mol_type = other RNA
caacaggtgtcaactcagtgaa

SEQ ID NO: 2721 - RNA, 22 nt, synthetic construct
  source 1..22: mol_type = other RNA
caacctacatgatggggaatga

SEQ ID NO: 2722 - RNA, 22 nt, synthetic construct
  source 1..22: mol_type = other RNA
caacggaacccagatttatgta

SEQ ID NO: 2723 - RNA, 22 nt, synthetic construct
  source 1..22: mol_type = other RNA
caactcagtgaaatggctttgc

SEQ ID NO: 2724 - RNA, 22 nt, synthetic construct
  source 1..22: mol_type = other RNA
caactcattccccatcatgtag

SEQ ID NO: 2725 - RNA, 22 nt, synthetic construct
  source 1..22: mol_type = other RNA
caaggactgagggccatggaca

SEQ ID NO: 2726 - RNA, 22 nt, synthetic construct
  source 1..22: mol_type = other RNA
caaggtggagctcatgtaccca

SEQ ID NO: 2727 - RNA, 22 nt, synthetic construct
  source 1..22: mol_type = other RNA
caagtgaacctcactatccaag

SEQ ID NO: 2728 - RNA, 22 nt, synthetic construct
  source 1..22: mol_type = other RNA
caatgcacgtggcccagcctgc

SEQ ID NO: 2729 - RNA, 22 nt, synthetic construct
  source 1..22: mol_type = other RNA
caattacataaatctgggttcc

SEQ ID NO: 2730 - RNA, 22 nt, synthetic construct
  source 1..22: mol_type = other RNA
cacaaagctggcgatgcctcgg

SEQ ID NO: 2731 - RNA, 22 nt, synthetic construct
  source 1..22: mol_type = other RNA
cacacaaagctggcgatgcctc

SEQ ID NO: 2732 - RNA, 22 nt, synthetic construct
  source 1..22: mol_type = other RNA
cacacacaaagctggcgatgcc

SEQ ID NO: 2733 - RNA, 22 nt, synthetic construct
  source 1..22: mol_type = other RNA
cacagacttcagtcacctggct

SEQ ID NO: 2734 - RNA, 22 nt, synthetic construct
  source 1..22: mol_type = other RNA
cacagcaggctgggccacgtgc

SEQ ID NO: 2735 - RNA, 22 nt, synthetic construct
  source 1..22: mol_type = other RNA
caccaattacataaatctgggt

SEQ ID NO: 2736 - RNA, 22 nt, synthetic construct
  source 1..22: mol_type = other RNA
cacccggacctcagtggctttg

SEQ ID NO: 2737 - RNA, 22 nt, synthetic construct
  source 1..22: mol_type = other RNA
caccgccatactacctgggcat

SEQ ID NO: 2738 - RNA, 22 nt, synthetic construct
  source 1..22: mol_type = other RNA
cacctccagtggaaatcaagtg

SEQ ID NO: 2739 - RNA, 22 nt, synthetic construct
  source 1..22: mol_type = other RNA
cacctggctgtcagcctgccga

SEQ ID NO: 2740 - RNA, 22 nt, synthetic construct
  source 1..22: mol_type = other RNA
caccttgcagatgtagagtccc

SEQ ID NO: 2741 - RNA, 22 nt, synthetic construct
  source 1..22: mol_type = other RNA
cacgggactctacatctgcaag

SEQ ID NO: 2742 - RNA, 22 nt, synthetic construct
  source 1..22: mol_type = other RNA
cacgggcacctccagtggaaat

SEQ ID NO: 2743 - RNA, 22 nt, synthetic construct
  source 1..22: mol_type = other RNA
cacgtgcattgctagcatggaa

SEQ ID NO: 2744 - RNA, 22 nt, synthetic construct
  source 1..22: mol_type = other RNA
cacgtggcccagcctgctgtgg

SEQ ID NO: 2745 - RNA, 22 nt, synthetic construct
  source 1..22: mol_type = other RNA
cactatccaaggactgagggcc

SEQ ID NO: 2746 - RNA, 22 nt, synthetic construct
  source 1..22: mol_type = other RNA
cactgaggtccgggtgacagtg

SEQ ID NO: 2747 - RNA, 22 nt, synthetic construct
  source 1..22: mol_type = other RNA
cactgagttccctttggctttt

SEQ ID NO: 2748 - RNA, 22 nt, synthetic construct
  source 1..22: mol_type = other RNA
cactggaggtgcccgtgcagat

SEQ ID NO: 2749 - RNA, 22 nt, synthetic construct
  source 1..22: mol_type = other RNA
cactgtcacccggacctcagtg

SEQ ID NO: 2750 - RNA, 22 nt, synthetic construct
  source 1..22: mol_type = other RNA
cacttgatttccactggaggtg

SEQ ID NO: 2751 - RNA, 22 nt, synthetic construct
  source 1..22: mol_type = other RNA
cagacttcagtcacctggctgt

SEQ ID NO: 2752 - RNA, 22 nt, synthetic construct
  source 1..22: mol_type = other RNA
cagatggaatcatctaggaagg

SEQ ID NO: 2753 - RNA, 22 nt, synthetic construct
  source 1..22: mol_type = other RNA
cagatgtagagtcccgtgtcca

SEQ ID NO: 2754 - RNA, 22 nt, synthetic construct
  source 1..22: mol_type = other RNA
cagatttatgtaattggtgagc

SEQ ID NO: 2755 - RNA, 22 nt, synthetic construct
  source 1..22: mol_type = other RNA
cagcagccgaggcatcgccagc

SEQ ID NO: 2756 - RNA, 22 nt, synthetic construct
  source 1..22: mol_type = other RNA
cagcaggctgggccacgtgcat

SEQ ID NO: 2757 - RNA, 22 nt, synthetic construct
  source 1..22: mol_type = other RNA
cagccaggtgactgaagtctgt

SEQ ID NO: 2758 - RNA, 22 nt, synthetic construct
  source 1..22: mol_type = other RNA
cagccgaggcatcgccagcttt

SEQ ID NO: 2759 - RNA, 22 nt, synthetic construct
  source 1..22: mol_type = other RNA
cagcctgccgaagcactgtcac

SEQ ID NO: 2760 - RNA, 22 nt, synthetic construct
  source 1..22: mol_type = other RNA
cagcctgctgtggtactggcca

SEQ ID NO: 2761 - RNA, 22 nt, synthetic construct
  source 1..22: mol_type = other RNA
cagctttgtgtgtgagtatgca

SEQ ID NO: 2762 - RNA, 22 nt, synthetic construct
  source 1..22: mol_type = other RNA
caggcaaagccactgaggtccg

SEQ ID NO: 2763 - RNA, 22 nt, synthetic construct
  source 1..22: mol_type = other RNA
caggctgacagccaggtgactg

SEQ ID NO: 2764 - RNA, 22 nt, synthetic construct
  source 1..22: mol_type = other RNA
caggctgggccacgtgcattgc

SEQ ID NO: 2765 - RNA, 22 nt, synthetic construct
  source 1..22: mol_type = other RNA
caggtagtatggcggtgggtac

SEQ ID NO: 2766 - RNA, 22 nt, synthetic construct
  source 1..22: mol_type = other RNA
caggtgactgaagtctgtgcgg

SEQ ID NO: 2767 - RNA, 22 nt, synthetic construct
  source 1..22: mol_type = other RNA
caggtgtcaactcagtgaaatg

SEQ ID NO: 2768 - RNA, 22 nt, synthetic construct
  source 1..22: mol_type = other RNA
cagtaccacagcaggctgggcc

SEQ ID NO: 2769 - RNA, 22 nt, synthetic construct
  source 1..22: mol_type = other RNA
cagtcacctggctgtcagcctg

SEQ ID NO: 2770 - RNA, 22 nt, synthetic construct
  source 1..22: mol_type = other RNA
cagtccttggatagtgaggttc

SEQ ID NO: 2771 - RNA, 22 nt, synthetic construct
  source 1..22: mol_type = other RNA
cagtgaaatggctttgctcacc

SEQ ID NO: 2772 - RNA, 22 nt, synthetic construct
  source 1..22: mol_type = other RNA
cagtgcttcggcaggctgacag

SEQ ID NO: 2773 - RNA, 22 nt, synthetic construct
  source 1..22: mol_type = other RNA
cagtggaaatcaagtgaacctc

SEQ ID NO: 2774 - RNA, 22 nt, synthetic construct
  source 1..22: mol_type = other RNA
cagtggctttgcctggagatgc

SEQ ID NO: 2775 - RNA, 22 nt, synthetic construct
  source 1..22: mol_type = other RNA
cataaatctgggttccgttgcc

SEQ ID NO: 2776 - RNA, 22 nt, synthetic construct
  source 1..22: mol_type = other RNA
catactacctgggcataggcaa

SEQ ID NO: 2777 - RNA, 22 nt, synthetic construct
  source 1..22: mol_type = other RNA
catactcacacacaaagctggc

SEQ ID NO: 2778 - RNA, 22 nt, synthetic construct
  source 1..22: mol_type = other RNA
cataggcaacggaacccagatt

SEQ ID NO: 2779 - RNA, 22 nt, synthetic construct
  source 1..22: mol_type = other RNA
catcatgtaggttgccgcacag

SEQ ID NO: 2780 - RNA, 22 nt, synthetic construct
  source 1..22: mol_type = other RNA
catcgccagctttgtgtgtgag

SEQ ID NO: 2781 - RNA, 22 nt, synthetic construct
  source 1..22: mol_type = other RNA
catctaggaaggtcaactcatt

SEQ ID NO: 2782 - RNA, 22 nt, synthetic construct
  source 1..22: mol_type = other RNA
catctccaggcaaagccactga

SEQ ID NO: 2783 - RNA, 22 nt, synthetic construct
  source 1..22: mol_type = other RNA
catctgcaaggtggagctcatg

SEQ ID NO: 2784 - RNA, 22 nt, synthetic construct
  source 1..22: mol_type = other RNA
catctgcacgggcacctccagt

SEQ ID NO: 2785 - RNA, 22 nt, synthetic construct
  source 1..22: mol_type = other RNA
catgagctccaccttgcagatg

SEQ ID NO: 2786 - RNA, 22 nt, synthetic construct
  source 1..22: mol_type = other RNA
catgagttcactgagttccctt

SEQ ID NO: 2787 - RNA, 22 nt, synthetic construct
  source 1..22: mol_type = other RNA
catgatggggaatgagttgacc

SEQ ID NO: 2788 - RNA, 22 nt, synthetic construct
  source 1..22: mol_type = other RNA
catgctagcaatgcacgtggcc

SEQ ID NO: 2789 - RNA, 22 nt, synthetic construct
  source 1..22: mol_type = other RNA
catggaaaagccaaagggaact

SEQ ID NO: 2790 - RNA, 22 nt, synthetic construct
  source 1..22: mol_type = other RNA
catggacacgggactctacatc

SEQ ID NO: 2791 - RNA, 22 nt, synthetic construct
  source 1..22: mol_type = other RNA
catggccctcagtccttggata

SEQ ID NO: 2792 - RNA, 22 nt, synthetic construct
  source 1..22: mol_type = other RNA
catgtacccaccgccatactac

SEQ ID NO: 2793 - RNA, 22 nt, synthetic construct
  source 1..22: mol_type = other RNA
catgtaggttgccgcacagact

SEQ ID NO: 2794 - RNA, 22 nt, synthetic construct
  source 1..22: mol_type = other RNA
cattccccatcatgtaggttgc

SEQ ID NO: 2795 - RNA, 22 nt, synthetic construct
  source 1..22: mol_type = other RNA
cattgctagcatggaaaagcca

SEQ ID NO: 2796 - RNA, 22 nt, synthetic construct
  source 1..22: mol_type = other RNA
ccaaggactgagggccatggac

SEQ ID NO: 2797 - RNA, 22 nt, synthetic construct
  source 1..22: mol_type = other RNA
ccaattacataaatctgggttc

SEQ ID NO: 2798 - RNA, 22 nt, synthetic construct
  source 1..22: mol_type = other RNA
ccacagcaggctgggccacgtg

SEQ ID NO: 2799 - RNA, 22 nt, synthetic construct
  source 1..22: mol_type = other RNA
ccaccgccatactacctgggca

SEQ ID NO: 2800 - RNA, 22 nt, synthetic construct
  source 1..22: mol_type = other RNA
ccaccttgcagatgtagagtcc

SEQ ID NO: 2801 - RNA, 22 nt, synthetic construct
  source 1..22: mol_type = other RNA
ccacgtgcattgctagcatgga

SEQ ID NO: 2802 - RNA, 22 nt, synthetic construct
  source 1..22: mol_type = other RNA
ccactgaggtccgggtgacagt

SEQ ID NO: 2803 - RNA, 22 nt, synthetic construct
  source 1..22: mol_type = other RNA
ccactggaggtgcccgtgcaga

SEQ ID NO: 2804 - RNA, 22 nt, synthetic construct
  source 1..22: mol_type = other RNA
ccagatttatgtaattggtgag

SEQ ID NO: 2805 - RNA, 22 nt, synthetic construct
  source 1..22: mol_type = other RNA
ccagcagccgaggcatcgccag

SEQ ID NO: 2806 - RNA, 22 nt, synthetic construct
  source 1..22: mol_type = other RNA
ccagcctgctgtggtactggcc

SEQ ID NO: 2807 - RNA, 22 nt, synthetic construct
  source 1..22: mol_type = other RNA
ccagctttgtgtgtgagtatgc

SEQ ID NO: 2808 - RNA, 22 nt, synthetic construct
  source 1..22: mol_type = other RNA
ccaggcaaagccactgaggtcc

SEQ ID NO: 2809 - RNA, 22 nt, synthetic construct
  source 1..22: mol_type = other RNA
ccaggtagtatggcggtgggta

SEQ ID NO: 2810 - RNA, 22 nt, synthetic construct
  source 1..22: mol_type = other RNA
ccaggtgactgaagtctgtgcg

SEQ ID NO: 2811 - RNA, 22 nt, synthetic construct
  source 1..22: mol_type = other RNA
ccagtaccacagcaggctgggc

SEQ ID NO: 2812 - RNA, 22 nt, synthetic construct
  source 1..22: mol_type = other RNA
ccagtggaaatcaagtgaacct

SEQ ID NO: 2813 - RNA, 22 nt, synthetic construct
  source 1..22: mol_type = other RNA
ccatactacctgggcataggca

SEQ ID NO: 2814 - RNA, 22 nt, synthetic construct
  source 1..22: mol_type = other RNA
ccatcatgtaggttgccgcaca

SEQ ID NO: 2815 - RNA, 22 nt, synthetic construct
  source 1..22: mol_type = other RNA
ccatctgcacgggcacctccag

SEQ ID NO: 2816 - RNA, 22 nt, synthetic construct
  source 1..22: mol_type = other RNA
ccatgctagcaatgcacgtggc

SEQ ID NO: 2817 - RNA, 22 nt, synthetic construct
  source 1..22: mol_type = other RNA
ccatggacacgggactctacat

SEQ ID NO: 2818 - RNA, 22 nt, synthetic construct
  source 1..22: mol_type = other RNA
ccatggccctcagtccttggat

SEQ ID NO: 2819 - RNA, 22 nt, synthetic construct
  source 1..22: mol_type = other RNA
cccaccgccatactacctgggc

SEQ ID NO: 2820 - RNA, 22 nt, synthetic construct
  source 1..22: mol_type = other RNA
cccagatttatgtaattggtga

SEQ ID NO: 2821 - RNA, 22 nt, synthetic construct
  source 1..22: mol_type = other RNA
cccagcctgctgtggtactggc

SEQ ID NO: 2822 - RNA, 22 nt, synthetic construct
  source 1..22: mol_type = other RNA
cccaggtagtatggcggtgggt

SEQ ID NO: 2823 - RNA, 22 nt, synthetic construct
  source 1..22: mol_type = other RNA
cccatcatgtaggttgccgcac

SEQ ID NO: 2824 - RNA, 22 nt, synthetic construct
  source 1..22: mol_type = other RNA
ccccatcatgtaggttgccgca

SEQ ID NO: 2825 - RNA, 22 nt, synthetic construct
  source 1..22: mol_type = other RNA
cccggacctcagtggctttgcc

SEQ ID NO: 2826 - RNA, 22 nt, synthetic construct
  source 1..22: mol_type = other RNA
cccgtgcagatggaatcatcta

SEQ ID NO: 2827 - RNA, 22 nt, synthetic construct
  source 1..22: mol_type = other RNA
cccgtgtccatggccctcagtc

SEQ ID NO: 2828 - RNA, 22 nt, synthetic construct
  source 1..22: mol_type = other RNA
ccctcagtccttggatagtgag

SEQ ID NO: 2829 - RNA, 22 nt, synthetic construct
  source 1..22: mol_type = other RNA
ccctttggcttttccatgctag

SEQ ID NO: 2830 - RNA, 22 nt, synthetic construct
  source 1..22: mol_type = other RNA
ccgaagcactgtcacccggacc

SEQ ID NO: 2831 - RNA, 22 nt, synthetic construct
  source 1..22: mol_type = other RNA
ccgaggcatcgccagctttgtg

SEQ ID NO: 2832 - RNA, 22 nt, synthetic construct
  source 1..22: mol_type = other RNA
ccgcacagacttcagtcacctg

SEQ ID NO: 2833 - RNA, 22 nt, synthetic construct
  source 1..22: mol_type = other RNA
ccgccatactacctgggcatag

SEQ ID NO: 2834 - RNA, 22 nt, synthetic construct
  source 1..22: mol_type = other RNA
ccggacctcagtggctttgcct

SEQ ID NO: 2835 - RNA, 22 nt, synthetic construct
  source 1..22: mol_type = other RNA
ccgggtgacagtgcttcggcag

SEQ ID NO: 2836 - RNA, 22 nt, synthetic construct
  source 1..22: mol_type = other RNA
ccgtgcagatggaatcatctag

SEQ ID NO: 2837 - RNA, 22 nt, synthetic construct
  source 1..22: mol_type = other RNA
ccgtgtccatggccctcagtcc

SEQ ID NO: 2838 - RNA, 22 nt, synthetic construct
  source 1..22: mol_type = other RNA
ccgttgcctatgcccaggtagt

SEQ ID NO: 2839 - RNA, 22 nt, synthetic construct
  source 1..22: mol_type = other RNA
cctacatgatggggaatgagtt

SEQ ID NO: 2840 - RNA, 22 nt, synthetic construct
  source 1..22: mol_type = other RNA
cctagatgattccatctgcacg

SEQ ID NO: 2841 - RNA, 22 nt, synthetic construct
  source 1..22: mol_type = other RNA
cctatgcccaggtagtatggcg

SEQ ID NO: 2842 - RNA, 22 nt, synthetic construct
  source 1..22: mol_type = other RNA
cctcactatccaaggactgagg

SEQ ID NO: 2843 - RNA, 22 nt, synthetic construct
  source 1..22: mol_type = other RNA
cctcagtccttggatagtgagg

SEQ ID NO: 2844 - RNA, 22 nt, synthetic construct
  source 1..22: mol_type = other RNA
cctcagtggctttgcctggaga

SEQ ID NO: 2845 - RNA, 22 nt, synthetic construct
  source 1..22: mol_type = other RNA
cctccagtggaaatcaagtgaa

SEQ ID NO: 2846 - RNA, 22 nt, synthetic construct
  source 1..22: mol_type = other RNA
cctcggctgctggccagtacca

SEQ ID NO: 2847 - RNA, 22 nt, synthetic construct
  source 1..22: mol_type = other RNA
cctgccgaagcactgtcacccg

SEQ ID NO: 2848 - RNA, 22 nt, synthetic construct
  source 1..22: mol_type = other RNA
cctgctgtggtactggccagca

SEQ ID NO: 2849 - RNA, 22 nt, synthetic construct
  source 1..22: mol_type = other RNA
cctggagatgcatactcacaca

SEQ ID NO: 2850 - RNA, 22 nt, synthetic construct
  source 1..22: mol_type = other RNA
cctggctgtcagcctgccgaag

SEQ ID NO: 2851 - RNA, 22 nt, synthetic construct
  source 1..22: mol_type = other RNA
cctgggcataggcaacggaacc

SEQ ID NO: 2852 - RNA, 22 nt, synthetic construct
  source 1..22: mol_type = other RNA
ccttcctagatgattccatctg

SEQ ID NO: 2853 - RNA, 22 nt, synthetic construct
  source 1..22: mol_type = other RNA
ccttgcagatgtagagtcccgt

SEQ ID NO: 2854 - RNA, 22 nt, synthetic construct
  source 1..22: mol_type = other RNA
ccttggatagtgaggttcactt

SEQ ID NO: 2855 - RNA, 22 nt, synthetic construct
  source 1..22: mol_type = other RNA
cctttggcttttccatgctagc

SEQ ID NO: 2856 - RNA, 22 nt, synthetic construct
  source 1..22: mol_type = other RNA
cgaagcactgtcacccggacct

SEQ ID NO: 2857 - RNA, 22 nt, synthetic construct
  source 1..22: mol_type = other RNA
cgaggcatcgccagctttgtgt

SEQ ID NO: 2858 - RNA, 22 nt, synthetic construct
  source 1..22: mol_type = other RNA
cgatgcctcggctgctggccag

SEQ ID NO: 2859 - RNA, 22 nt, synthetic construct
  source 1..22: mol_type = other RNA
cgcacagacttcagtcacctgg

SEQ ID NO: 2860 - RNA, 22 nt, synthetic construct
  source 1..22: mol_type = other RNA
cgccagctttgtgtgtgagtat

SEQ ID NO: 2861 - RNA, 22 nt, synthetic construct
  source 1..22: mol_type = other RNA
cgccatactacctgggcatagg

SEQ ID NO: 2862 - RNA, 22 nt, synthetic construct
  source 1..22: mol_type = other RNA
cggaacccagatttatgtaatt

SEQ ID NO: 2863 - RNA, 22 nt, synthetic construct
  source 1..22: mol_type = other RNA
cggacctcagtggctttgcctg

SEQ ID NO: 2864 - RNA, 22 nt, synthetic construct
  source 1..22: mol_type = other RNA
cggcaacctacatgatggggaa

SEQ ID NO: 2865 - RNA, 22 nt, synthetic construct
  source 1..22: mol_type = other RNA
cggcaggctgacagccaggtga

SEQ ID NO: 2866 - RNA, 22 nt, synthetic construct
  source 1..22: mol_type = other RNA
cggctgctggccagtaccacag

SEQ ID NO: 2867 - RNA, 22 nt, synthetic construct
  source 1..22: mol_type = other RNA
cgggactctacatctgcaaggt

SEQ ID NO: 2868 - RNA, 22 nt, synthetic construct
  source 1..22: mol_type = other RNA
cgggcacctccagtggaaatca

SEQ ID NO: 2869 - RNA, 22 nt, synthetic construct
  source 1..22: mol_type = other RNA
cgggtgacagtgcttcggcagg

SEQ ID NO: 2870 - RNA, 22 nt, synthetic construct
  source 1..22: mol_type = other RNA
cggtgggtacatgagctccacc

SEQ ID NO: 2871 - RNA, 22 nt, synthetic construct
  source 1..22: mol_type = other RNA
cgtgcagatggaatcatctagg

SEQ ID NO: 2872 - RNA, 22 nt, synthetic construct
  source 1..22: mol_type = other RNA
cgtgcattgctagcatggaaaa

SEQ ID NO: 2873 - RNA, 22 nt, synthetic construct
  source 1..22: mol_type = other RNA
cgtggcccagcctgctgtggta

SEQ ID NO: 2874 - RNA, 22 nt, synthetic construct
  source 1..22: mol_type = other RNA
cgtgtccatggccctcagtcct

SEQ ID NO: 2875 - RNA, 22 nt, synthetic construct
  source 1..22: mol_type = other RNA
cgttgcctatgcccaggtagta

SEQ ID NO: 2876 - RNA, 22 nt, synthetic construct
  source 1..22: mol_type = other RNA
ctacatctgcaaggtggagctc

SEQ ID NO: 2877 - RNA, 22 nt, synthetic construct
  source 1..22: mol_type = other RNA
ctacatgatggggaatgagttg

SEQ ID NO: 2878 - RNA, 22 nt, synthetic construct
  source 1..22: mol_type = other RNA
ctacctgggcataggcaacgga

SEQ ID NO: 2879 - RNA, 22 nt, synthetic construct
  source 1..22: mol_type = other RNA
ctagatgattccatctgcacgg

SEQ ID NO: 2880 - RNA, 22 nt, synthetic construct
  source 1..22: mol_type = other RNA
ctagcaatgcacgtggcccagc

SEQ ID NO: 2881 - RNA, 22 nt, synthetic construct
  source 1..22: mol_type = other RNA
ctagcatggaaaagccaaaggg

SEQ ID NO: 2882 - RNA, 22 nt, synthetic construct
  source 1..22: mol_type = other RNA
ctaggaaggtcaactcattccc

SEQ ID NO: 2883 - RNA, 22 nt, synthetic construct
  source 1..22: mol_type = other RNA
ctatccaaggactgagggccat

SEQ ID NO: 2884 - RNA, 22 nt, synthetic construct
  source 1..22: mol_type = other RNA
ctatgcccaggtagtatggcgg

SEQ ID NO: 2885 - RNA, 22 nt, synthetic construct
  source 1..22: mol_type = other RNA
ctcacacacaaagctggcgatg

SEQ ID NO: 2886 - RNA, 22 nt, synthetic construct
  source 1..22: mol_type = other RNA
ctcaccaattacataaatctgg

SEQ ID NO: 2887 - RNA, 22 nt, synthetic construct
  source 1..22: mol_type = other RNA
ctcactatccaaggactgaggg

SEQ ID NO: 2888 - RNA, 22 nt, synthetic construct
  source 1..22: mol_type = other RNA
ctcagtccttggatagtgaggt

SEQ ID NO: 2889 - RNA, 22 nt, synthetic construct
  source 1..22: mol_type = other RNA
ctcagtgaaatggctttgctca

SEQ ID NO: 2890 - RNA, 22 nt, synthetic construct
  source 1..22: mol_type = other RNA
ctcagtggctttgcctggagat

SEQ ID NO: 2891 - RNA, 22 nt, synthetic construct
  source 1..22: mol_type = other RNA
ctcatgtacccaccgccatact

SEQ ID NO: 2892 - RNA, 22 nt, synthetic construct
  source 1..22: mol_type = other RNA
ctcattccccatcatgtaggtt

SEQ ID NO: 2893 - RNA, 22 nt, synthetic construct
  source 1..22: mol_type = other RNA
ctccaccttgcagatgtagagt

SEQ ID NO: 2894 - RNA, 22 nt, synthetic construct
  source 1..22: mol_type = other RNA
ctccaggcaaagccactgaggt

SEQ ID NO: 2895 - RNA, 22 nt, synthetic construct
  source 1..22: mol_type = other RNA
ctccagtggaaatcaagtgaac

SEQ ID NO: 2896 - RNA, 22 nt, synthetic construct
  source 1..22: mol_type = other RNA
ctcggctgctggccagtaccac

SEQ ID NO: 2897 - RNA, 22 nt, synthetic construct
  source 1..22: mol_type = other RNA
ctctacatctgcaaggtggagc

SEQ ID NO: 2898 - RNA, 22 nt, synthetic construct
  source 1..22: mol_type = other RNA
ctgaagtctgtgcggcaaccta

SEQ ID NO: 2899 - RNA, 22 nt, synthetic construct
  source 1..22: mol_type = other RNA
ctgacagccaggtgactgaagt

SEQ ID NO: 2900 - RNA, 22 nt, synthetic construct
  source 1..22: mol_type = other RNA
ctgagggccatggacacgggac

SEQ ID NO: 2901 - RNA, 22 nt, synthetic construct
  source 1..22: mol_type = other RNA
ctgaggtccgggtgacagtgct

SEQ ID NO: 2902 - RNA, 22 nt, synthetic construct
  source 1..22: mol_type = other RNA
ctgagttccctttggcttttcc

SEQ ID NO: 2903 - RNA, 22 nt, synthetic construct
  source 1..22: mol_type = other RNA
ctgcaaggtggagctcatgtac

SEQ ID NO: 2904 - RNA, 22 nt, synthetic construct
  source 1..22: mol_type = other RNA
ctgcacgggcacctccagtgga

SEQ ID NO: 2905 - RNA, 22 nt, synthetic construct
  source 1..22: mol_type = other RNA
ctgccgaagcactgtcacccgg

SEQ ID NO: 2906 - RNA, 22 nt, synthetic construct
  source 1..22: mol_type = other RNA
ctgctggccagtaccacagcag

SEQ ID NO: 2907 - RNA, 22 nt, synthetic construct
  source 1..22: mol_type = other RNA
ctgctgtggtactggccagcag

SEQ ID NO: 2908 - RNA, 22 nt, synthetic construct
  source 1..22: mol_type = other RNA
ctggagatgcatactcacacac

SEQ ID NO: 2909 - RNA, 22 nt, synthetic construct
  source 1..22: mol_type = other RNA
ctggaggtgcccgtgcagatgg

SEQ ID NO: 2910 - RNA, 22 nt, synthetic construct
  source 1..22: mol_type = other RNA
ctggccagcagccgaggcatcg

SEQ ID NO: 2911 - RNA, 22 nt, synthetic construct
  source 1..22: mol_type = other RNA
ctggccagtaccacagcaggct

SEQ ID NO: 2912 - RNA, 22 nt, synthetic construct
  source 1..22: mol_type = other RNA
ctggcgatgcctcggctgctgg

SEQ ID NO: 2913 - RNA, 22 nt, synthetic construct
  source 1..22: mol_type = other RNA
ctggctgtcagcctgccgaagc

SEQ ID NO: 2914 - RNA, 22 nt, synthetic construct
  source 1..22: mol_type = other RNA
ctgggcataggcaacggaaccc

SEQ ID NO: 2915 - RNA, 22 nt, synthetic construct
  source 1..22: mol_type = other RNA
ctgggccacgtgcattgctagc

SEQ ID NO: 2916 - RNA, 22 nt, synthetic construct
  source 1..22: mol_type = other RNA
ctgggttccgttgcctatgccc

SEQ ID NO: 2917 - RNA, 22 nt, synthetic construct
  source 1..22: mol_type = other RNA
ctgtcacccggacctcagtggc

SEQ ID NO: 2918 - RNA, 22 nt, synthetic construct
  source 1..22: mol_type = other RNA
ctgtcagcctgccgaagcactg

SEQ ID NO: 2919 - RNA, 22 nt, synthetic construct
  source 1..22: mol_type = other RNA
ctgtgcggcaacctacatgatg

SEQ ID NO: 2920 - RNA, 22 nt, synthetic construct
  source 1..22: mol_type = other RNA
ctgtggtactggccagcagccg

SEQ ID NO: 2921 - RNA, 22 nt, synthetic construct
  source 1..22: mol_type = other RNA
cttcagtcacctggctgtcagc

SEQ ID NO: 2922 - RNA, 22 nt, synthetic construct
  source 1..22: mol_type = other RNA
cttcctagatgattccatctgc

SEQ ID NO: 2923 - RNA, 22 nt, synthetic construct
  source 1..22: mol_type = other RNA
cttcggcaggctgacagccagg

SEQ ID NO: 2924 - RNA, 22 nt, synthetic construct
  source 1..22: mol_type = other RNA
cttgatttccactggaggtgcc

SEQ ID NO: 2925 - RNA, 22 nt, synthetic construct
  source 1..22: mol_type = other RNA
cttgcagatgtagagtcccgtg

SEQ ID NO: 2926 - RNA, 22 nt, synthetic construct
  source 1..22: mol_type = other RNA
cttggatagtgaggttcacttg

SEQ ID NO: 2927 - RNA, 22 nt, synthetic construct
  source 1..22: mol_type = other RNA
ctttgcctggagatgcatactc

SEQ ID NO: 2928 - RNA, 22 nt, synthetic construct
  source 1..22: mol_type = other RNA
ctttgctcaccaattacataaa

SEQ ID NO: 2929 - RNA, 22 nt, synthetic construct
  source 1..22: mol_type = other RNA
ctttggcttttccatgctagca

SEQ ID NO: 2930 - RNA, 22 nt, synthetic construct
  source 1..22: mol_type = other RNA
ctttgtgtgtgagtatgcatct

SEQ ID NO: 2931 - RNA, 22 nt, synthetic construct
  source 1..22: mol_type = other RNA
cttttccatgctagcaatgcac

SEQ ID NO: 2932 - RNA, 22 nt, synthetic construct
  source 1..22: mol_type = other RNA
gaaaagccaaagggaactcagt

SEQ ID NO: 2933 - RNA, 22 nt, synthetic construct
  source 1..22: mol_type = other RNA
gaaatcaagtgaacctcactat

SEQ ID NO: 2934 - RNA, 22 nt, synthetic construct
  source 1..22: mol_type = other RNA
gaaatggctttgctcaccaatt

SEQ ID NO: 2935 - RNA, 22 nt, synthetic construct
  source 1..22: mol_type = other RNA
gaacccagatttatgtaattgg

SEQ ID NO: 2936 - RNA, 22 nt, synthetic construct
  source 1..22: mol_type = other RNA
gaacctcactatccaaggactg

SEQ ID NO: 2937 - RNA, 22 nt, synthetic construct
  source 1..22: mol_type = other RNA
gaagcactgtcacccggacctc

SEQ ID NO: 2938 - RNA, 22 nt, synthetic construct
  source 1..22: mol_type = other RNA
gaaggtcaactcattccccatc

SEQ ID NO: 2939 - RNA, 22 nt, synthetic construct
  source 1..22: mol_type = other RNA
gaagtctgtgcggcaacctaca

SEQ ID NO: 2940 - RNA, 22 nt, synthetic construct
  source 1..22: mol_type = other RNA
gaatcatctaggaaggtcaact

SEQ ID NO: 2941 - RNA, 22 nt, synthetic construct
  source 1..22: mol_type = other RNA
gaatgagttgaccttcctagat

SEQ ID NO: 2942 - RNA, 22 nt, synthetic construct
  source 1..22: mol_type = other RNA
gacacgggactctacatctgca

SEQ ID NO: 2943 - RNA, 22 nt, synthetic construct
  source 1..22: mol_type = other RNA
gacagccaggtgactgaagtct

SEQ ID NO: 2944 - RNA, 22 nt, synthetic construct
  source 1..22: mol_type = other RNA
gacagtgcttcggcaggctgac

SEQ ID NO: 2945 - RNA, 22 nt, synthetic construct
  source 1..22: mol_type = other RNA
gacctcagtggctttgcctgga

SEQ ID NO: 2946 - RNA, 22 nt, synthetic construct
  source 1..22: mol_type = other RNA
gaccttcctagatgattccatc

SEQ ID NO: 2947 - RNA, 22 nt, synthetic construct
  source 1..22: mol_type = other RNA
gactctacatctgcaaggtgga

SEQ ID NO: 2948 - RNA, 22 nt, synthetic construct
  source 1..22: mol_type = other RNA
gactgaagtctgtgcggcaacc

SEQ ID NO: 2949 - RNA, 22 nt, synthetic construct
  source 1..22: mol_type = other RNA
gactgagggccatggacacggg

SEQ ID NO: 2950 - RNA, 22 nt, synthetic construct
  source 1..22: mol_type = other RNA
gacttcagtcacctggctgtca

SEQ ID NO: 2951 - RNA, 22 nt, synthetic construct
  source 1..22: mol_type = other RNA
gagatgcatactcacacacaaa

SEQ ID NO: 2952 - RNA, 22 nt, synthetic construct
  source 1..22: mol_type = other RNA
gagcaaagccatttcactgagt

SEQ ID NO: 2953 - RNA, 22 nt, synthetic construct
  source 1..22: mol_type = other RNA
gagctcatgtacccaccgccat

SEQ ID NO: 2954 - RNA, 22 nt, synthetic construct
  source 1..22: mol_type = other RNA
gagctccaccttgcagatgtag

SEQ ID NO: 2955 - RNA, 22 nt, synthetic construct
  source 1..22: mol_type = other RNA
gaggcatcgccagctttgtgtg

SEQ ID NO: 2956 - RNA, 22 nt, synthetic construct
  source 1..22: mol_type = other RNA
gagggccatggacacgggactc

SEQ ID NO: 2957 - RNA, 22 nt, synthetic construct
  source 1..22: mol_type = other RNA
gaggtccgggtgacagtgcttc

SEQ ID NO: 2958 - RNA, 22 nt, synthetic construct
  source 1..22: mol_type = other RNA
gaggtgcccgtgcagatggaat

SEQ ID NO: 2959 - RNA, 22 nt, synthetic construct
  source 1..22: mol_type = other RNA
gaggttcacttgatttccactg

SEQ ID NO: 2960 - RNA, 22 nt, synthetic construct
  source 1..22: mol_type = other RNA
gagtatgcatctccaggcaaag

SEQ ID NO: 2961 - RNA, 22 nt, synthetic construct
  source 1..22: mol_type = other RNA
gagtcccgtgtccatggccctc

SEQ ID NO: 2962 - RNA, 22 nt, synthetic construct
  source 1..22: mol_type = other RNA
gagttcactgagttccctttgg

SEQ ID NO: 2963 - RNA, 22 nt, synthetic construct
  source 1..22: mol_type = other RNA
gagttccctttggcttttccat

SEQ ID NO: 2964 - RNA, 22 nt, synthetic construct
  source 1..22: mol_type = other RNA
gagttgaccttcctagatgatt

SEQ ID NO: 2965 - RNA, 22 nt, synthetic construct
  source 1..22: mol_type = other RNA
gatagtgaggttcacttgattt

SEQ ID NO: 2966 - RNA, 22 nt, synthetic construct
  source 1..22: mol_type = other RNA
gatgattccatctgcacgggca

SEQ ID NO: 2967 - RNA, 22 nt, synthetic construct
  source 1..22: mol_type = other RNA
gatgcatactcacacacaaagc

SEQ ID NO: 2968 - RNA, 22 nt, synthetic construct
  source 1..22: mol_type = other RNA
gatgcctcggctgctggccagt

SEQ ID NO: 2969 - RNA, 22 nt, synthetic construct
  source 1..22: mol_type = other RNA
gatggaatcatctaggaaggtc

SEQ ID NO: 2970 - RNA, 22 nt, synthetic construct
  source 1..22: mol_type = other RNA
gatggggaatgagttgaccttc

SEQ ID NO: 2971 - RNA, 22 nt, synthetic construct
  source 1..22: mol_type = other RNA
gatgtagagtcccgtgtccatg

SEQ ID NO: 2972 - RNA, 22 nt, synthetic construct
  source 1..22: mol_type = other RNA
gattccatctgcacgggcacct

SEQ ID NO: 2973 - RNA, 22 nt, synthetic construct
  source 1..22: mol_type = other RNA
gatttatgtaattggtgagcaa

SEQ ID NO: 2974 - RNA, 22 nt, synthetic construct
  source 1..22: mol_type = other RNA
gatttccactggaggtgcccgt

SEQ ID NO: 2975 - RNA, 22 nt, synthetic construct
  source 1..22: mol_type = other RNA
gcaaagccactgaggtccgggt

SEQ ID NO: 2976 - RNA, 22 nt, synthetic construct
  source 1..22: mol_type = other RNA
gcaaagccatttcactgagttg

SEQ ID NO: 2977 - RNA, 22 nt, synthetic construct
  source 1..22: mol_type = other RNA
gcaacaggtgtcaactcagtga

SEQ ID NO: 2978 - RNA, 22 nt, synthetic construct
  source 1..22: mol_type = other RNA
gcaacctacatgatggggaatg

SEQ ID NO: 2979 - RNA, 22 nt, synthetic construct
  source 1..22: mol_type = other RNA
gcaacggaacccagatttatgt

SEQ ID NO: 2980 - RNA, 22 nt, synthetic construct
  source 1..22: mol_type = other RNA
gcaaggtggagctcatgtaccc

SEQ ID NO: 2981 - RNA, 22 nt, synthetic construct
  source 1..22: mol_type = other RNA
gcaatgcacgtggcccagcctg

SEQ ID NO: 2982 - RNA, 22 nt, synthetic construct
  source 1..22: mol_type = other RNA
gcacagacttcagtcacctggc

SEQ ID NO: 2983 - RNA, 22 nt, synthetic construct
  source 1..22: mol_type = other RNA
gcacctccagtggaaatcaagt

SEQ ID NO: 2984 - RNA, 22 nt, synthetic construct
  source 1..22: mol_type = other RNA
gcacgggcacctccagtggaaa

SEQ ID NO: 2985 - RNA, 22 nt, synthetic construct
  source 1..22: mol_type = other RNA
gcacgtggcccagcctgctgtg

SEQ ID NO: 2986 - RNA, 22 nt, synthetic construct
  source 1..22: mol_type = other RNA
gcactgtcacccggacctcagt

SEQ ID NO: 2987 - RNA, 22 nt, synthetic construct
  source 1..22: mol_type = other RNA
gcagatggaatcatctaggaag

SEQ ID NO: 2988 - RNA, 22 nt, synthetic construct
  source 1..22: mol_type = other RNA
gcagatgtagagtcccgtgtcc

SEQ ID NO: 2989 - RNA, 22 nt, synthetic construct
  source 1..22: mol_type = other RNA
gcagccgaggcatcgccagctt

SEQ ID NO: 2990 - RNA, 22 nt, synthetic construct
  source 1..22: mol_type = other RNA
gcaggctgacagccaggtgact

SEQ ID NO: 2991 - RNA, 22 nt, synthetic construct
  source 1..22: mol_type = other RNA
gcaggctgggccacgtgcattg

SEQ ID NO: 2992 - RNA, 22 nt, synthetic construct
  source 1..22: mol_type = other RNA
gcatactcacacacaaagctgg

SEQ ID NO: 2993 - RNA, 22 nt, synthetic construct
  source 1..22: mol_type = other RNA
gcataggcaacggaacccagat

SEQ ID NO: 2994 - RNA, 22 nt, synthetic construct
  source 1..22: mol_type = other RNA
gcatcgccagctttgtgtgtga

SEQ ID NO: 2995 - RNA, 22 nt, synthetic construct
  source 1..22: mol_type = other RNA
gcatctccaggcaaagccactg

SEQ ID NO: 2996 - RNA, 22 nt, synthetic construct
  source 1..22: mol_type = other RNA
gcatggaaaagccaaagggaac

SEQ ID NO: 2997 - RNA, 22 nt, synthetic construct
  source 1..22: mol_type = other RNA
gcattgctagcatggaaaagcc

SEQ ID NO: 2998 - RNA, 22 nt, synthetic construct
  source 1..22: mol_type = other RNA
gccacgtgcattgctagcatgg

SEQ ID NO: 2999 - RNA, 22 nt, synthetic construct
  source 1..22: mol_type = other RNA
gccactgaggtccgggtgacag

SEQ ID NO: 3000 - RNA, 22 nt, synthetic construct
  source 1..22: mol_type = other RNA
gccagcagccgaggcatcgcca

SEQ ID NO: 3001 - RNA, 22 nt, synthetic construct
  source 1..22: mol_type = other RNA
gccagctttgtgtgtgagtatg

SEQ ID NO: 3002 - RNA, 22 nt, synthetic construct
  source 1..22: mol_type = other RNA
gccaggtgactgaagtctgtgc

SEQ ID NO: 3003 - RNA, 22 nt, synthetic construct
  source 1..22: mol_type = other RNA
gccagtaccacagcaggctggg

SEQ ID NO: 3004 - RNA, 22 nt, synthetic construct
  source 1..22: mol_type = other RNA
gccatactacctgggcataggc

SEQ ID NO: 3005 - RNA, 22 nt, synthetic construct
  source 1..22: mol_type = other RNA
gccatggacacgggactctaca

SEQ ID NO: 3006 - RNA, 22 nt, synthetic construct
  source 1..22: mol_type = other RNA
gcccagcctgctgtggtactgg

SEQ ID NO: 3007 - RNA, 22 nt, synthetic construct
  source 1..22: mol_type = other RNA
gcccaggtagtatggcggtggg

SEQ ID NO: 3008 - RNA, 22 nt, synthetic construct
  source 1..22: mol_type = other RNA
gcccgtgcagatggaatcatct

SEQ ID NO: 3009 - RNA, 22 nt, synthetic construct
  source 1..22: mol_type = other RNA
gccctcagtccttggatagtga

SEQ ID NO: 3010 - RNA, 22 nt, synthetic construct
  source 1..22: mol_type = other RNA
gccgaagcactgtcacccggac

SEQ ID NO: 3011 - RNA, 22 nt, synthetic construct
  source 1..22: mol_type = other RNA
gccgaggcatcgccagctttgt

SEQ ID NO: 3012 - RNA, 22 nt, synthetic construct
  source 1..22: mol_type = other RNA
gccgcacagacttcagtcacct

SEQ ID NO: 3013 - RNA, 22 nt, synthetic construct
  source 1..22: mol_type = other RNA
gcctatgcccaggtagtatggc

SEQ ID NO: 3014 - RNA, 22 nt, synthetic construct
  source 1..22: mol_type = other RNA
gcctcggctgctggccagtacc

SEQ ID NO: 3015 - RNA, 22 nt, synthetic construct
  source 1..22: mol_type = other RNA
gcctgccgaagcactgtcaccc

SEQ ID NO: 3016 - RNA, 22 nt, synthetic construct
  source 1..22: mol_type = other RNA
gcctgctgtggtactggccagc

SEQ ID NO: 3017 - RNA, 22 nt, synthetic construct
  source 1..22: mol_type = other RNA
gcctggagatgcatactcacac

SEQ ID NO: 3018 - RNA, 22 nt, synthetic construct
  source 1..22: mol_type = other RNA
gcgatgcctcggctgctggcca

SEQ ID NO: 3019 - RNA, 22 nt, synthetic construct
  source 1..22: mol_type = other RNA
gcggcaacctacatgatgggga

SEQ ID NO: 3020 - RNA, 22 nt, synthetic construct
  source 1..22: mol_type = other RNA
gcggtgggtacatgagctccac

SEQ ID NO: 3021 - RNA, 22 nt, synthetic construct
  source 1..22: mol_type = other RNA
gctagcaatgcacgtggcccag

SEQ ID NO: 3022 - RNA, 22 nt, synthetic construct
  source 1..22: mol_type = other RNA
gctagcatggaaaagccaaagg

SEQ ID NO: 3023 - RNA, 22 nt, synthetic construct
  source 1..22: mol_type = other RNA
gctcaccaattacataaatctg

SEQ ID NO: 3024 - RNA, 22 nt, synthetic construct
  source 1..22: mol_type = other RNA
gctcatgtacccaccgccatac

SEQ ID NO: 3025 - RNA, 22 nt, synthetic construct
  source 1..22: mol_type = other RNA
gctccaccttgcagatgtagag

SEQ ID NO: 3026 - RNA, 22 nt, synthetic construct
  source 1..22: mol_type = other RNA
gctgacagccaggtgactgaag

SEQ ID NO: 3027 - RNA, 22 nt, synthetic construct
  source 1..22: mol_type = other RNA
gctgctggccagtaccacagca

SEQ ID NO: 3028 - RNA, 22 nt, synthetic construct
  source 1..22: mol_type = other RNA
gctggccagtaccacagcaggc

SEQ ID NO: 3029 - RNA, 22 nt, synthetic construct
  source 1..22: mol_type = other RNA
gctggcgatgcctcggctgctg

SEQ ID NO: 3030 - RNA, 22 nt, synthetic construct
  source 1..22: mol_type = other RNA
gctgggccacgtgcattgctag

SEQ ID NO: 3031 - RNA, 22 nt, synthetic construct
  source 1..22: mol_type = other RNA
gctgtcagcctgccgaagcact

SEQ ID NO: 3032 - RNA, 22 nt, synthetic construct
  source 1..22: mol_type = other RNA
gctgtggtactggccagcagcc

SEQ ID NO: 3033 - RNA, 22 nt, synthetic construct
  source 1..22: mol_type = other RNA
gcttcggcaggctgacagccag

SEQ ID NO: 3034 - RNA, 22 nt, synthetic construct
  source 1..22: mol_type = other RNA
gctttgcctggagatgcatact

SEQ ID NO: 3035 - RNA, 22 nt, synthetic construct
  source 1..22: mol_type = other RNA
gctttgctcaccaattacataa

SEQ ID NO: 3036 - RNA, 22 nt, synthetic construct
  source 1..22: mol_type = other RNA
gctttgtgtgtgagtatgcatc

SEQ ID NO: 3037 - RNA, 22 nt, synthetic construct
  source 1..22: mol_type = other RNA
gcttttccatgctagcaatgca

SEQ ID NO: 3038 - RNA, 22 nt, synthetic construct
  source 1..22: mol_type = other RNA
ggaaaagccaaagggaactcag

SEQ ID NO: 3039 - RNA, 22 nt, synthetic construct
  source 1..22: mol_type = other RNA
ggaaatcaagtgaacctcacta

SEQ ID NO: 3040 - RNA, 22 nt, synthetic construct
  source 1..22: mol_type = other RNA
ggaacccagatttatgtaattg

SEQ ID NO: 3041 - RNA, 22 nt, synthetic construct
  source 1..22: mol_type = other RNA
ggaaggtcaactcattccccat

SEQ ID NO: 3042 - RNA, 22 nt, synthetic construct
  source 1..22: mol_type = other RNA
ggaatcatctaggaaggtcaac

SEQ ID NO: 3043 - RNA, 22 nt, synthetic construct
  source 1..22: mol_type = other RNA
ggaatgagttgaccttcctaga

SEQ ID NO: 3044 - RNA, 22 nt, synthetic construct
  source 1..22: mol_type = other RNA
ggacacgggactctacatctgc

SEQ ID NO: 3045 - RNA, 22 nt, synthetic construct
  source 1..22: mol_type = other RNA
ggacctcagtggctttgcctgg

SEQ ID NO: 3046 - RNA, 22 nt, synthetic construct
  source 1..22: mol_type = other RNA
ggactctacatctgcaaggtgg

SEQ ID NO: 3047 - RNA, 22 nt, synthetic construct
  source 1..22: mol_type = other RNA
ggactgagggccatggacacgg

SEQ ID NO: 3048 - RNA, 22 nt, synthetic construct
  source 1..22: mol_type = other RNA
ggagatgcatactcacacacaa

SEQ ID NO: 3049 - RNA, 22 nt, synthetic construct
  source 1..22: mol_type = other RNA
ggagctcatgtacccaccgcca

SEQ ID NO: 3050 - RNA, 22 nt, synthetic construct
  source 1..22: mol_type = other RNA
ggaggtgcccgtgcagatggaa

SEQ ID NO: 3051 - RNA, 22 nt, synthetic construct
  source 1..22: mol_type = other RNA
ggatagtgaggttcacttgatt

SEQ ID NO: 3052 - RNA, 22 nt, synthetic construct
  source 1..22: mol_type = other RNA
ggcaaagccactgaggtccggg

SEQ ID NO: 3053 - RNA, 22 nt, synthetic construct
  source 1..22: mol_type = other RNA
ggcaacctacatgatggggaat

SEQ ID NO: 3054 - RNA, 22 nt, synthetic construct
  source 1..22: mol_type = other RNA
ggcaacggaacccagatttatg

SEQ ID NO: 3055 - RNA, 22 nt, synthetic construct
  source 1..22: mol_type = other RNA
ggcacctccagtggaaatcaag

SEQ ID NO: 3056 - RNA, 22 nt, synthetic construct
  source 1..22: mol_type = other RNA
ggcaggctgacagccaggtgac

SEQ ID NO: 3057 - RNA, 22 nt, synthetic construct
  source 1..22: mol_type = other RNA
ggcataggcaacggaacccaga

SEQ ID NO: 3058 - RNA, 22 nt, synthetic construct
  source 1..22: mol_type = other RNA
ggcatcgccagctttgtgtgtg

SEQ ID NO: 3059 - RNA, 22 nt, synthetic construct
  source 1..22: mol_type = other RNA
ggccacgtgcattgctagcatg

SEQ ID NO: 3060 - RNA, 22 nt, synthetic construct
  source 1..22: mol_type = other RNA
ggccagcagccgaggcatcgcc

SEQ ID NO: 3061 - RNA, 22 nt, synthetic construct
  source 1..22: mol_type = other RNA
ggccagtaccacagcaggctgg

SEQ ID NO: 3062 - RNA, 22 nt, synthetic construct
  source 1..22: mol_type = other RNA
ggccatggacacgggactctac

SEQ ID NO: 3063 - RNA, 22 nt, synthetic construct
  source 1..22: mol_type = other RNA
ggcccagcctgctgtggtactg

SEQ ID NO: 3064 - RNA, 22 nt, synthetic construct
  source 1..22: mol_type = other RNA
ggccctcagtccttggatagtg

SEQ ID NO: 3065 - RNA, 22 nt, synthetic construct
  source 1..22: mol_type = other RNA
ggcgatgcctcggctgctggcc

SEQ ID NO: 3066 - RNA, 22 nt, synthetic construct
  source 1..22: mol_type = other RNA
ggcggtgggtacatgagctcca

SEQ ID NO: 3067 - RNA, 22 nt, synthetic construct
  source 1..22: mol_type = other RNA
ggctgacagccaggtgactgaa

SEQ ID NO: 3068 - RNA, 22 nt, synthetic construct
  source 1..22: mol_type = other RNA
ggctgctggccagtaccacagc

SEQ ID NO: 3069 - RNA, 22 nt, synthetic construct
  source 1..22: mol_type = other RNA
ggctgggccacgtgcattgcta

SEQ ID NO: 3070 - RNA, 22 nt, synthetic construct
  source 1..22: mol_type = other RNA
ggctgtcagcctgccgaagcac

SEQ ID NO: 3071 - RNA, 22 nt, synthetic construct
  source 1..22: mol_type = other RNA
ggctttgcctggagatgcatac

SEQ ID NO: 3072 - RNA, 22 nt, synthetic construct
  source 1..22: mol_type = other RNA
ggctttgctcaccaattacata

SEQ ID NO: 3073 - RNA, 22 nt, synthetic construct
  source 1..22: mol_type = other RNA
ggcttttccatgctagcaatgc

SEQ ID NO: 3074 - RNA, 22 nt, synthetic construct
  source 1..22: mol_type = other RNA
gggaatgagttgaccttcctag

SEQ ID NO: 3075 - RNA, 22 nt, synthetic construct
  source 1..22: mol_type = other RNA
gggactctacatctgcaaggtg

SEQ ID NO: 3076 - RNA, 22 nt, synthetic construct
  source 1..22: mol_type = other RNA
gggcacctccagtggaaatcaa

SEQ ID NO: 3077 - RNA, 22 nt, synthetic construct
  source 1..22: mol_type = other RNA
gggcataggcaacggaacccag

SEQ ID NO: 3078 - RNA, 22 nt, synthetic construct
  source 1..22: mol_type = other RNA
gggccacgtgcattgctagcat

SEQ ID NO: 3079 - RNA, 22 nt, synthetic construct
  source 1..22: mol_type = other RNA
gggccatggacacgggactcta

SEQ ID NO: 3080 - RNA, 22 nt, synthetic construct
  source 1..22: mol_type = other RNA
ggggaatgagttgaccttccta

SEQ ID NO: 3081 - RNA, 22 nt, synthetic construct
  source 1..22: mol_type = other RNA
gggtacatgagctccaccttgc

SEQ ID NO: 3082 - RNA, 22 nt, synthetic construct
  source 1..22: mol_type = other RNA
gggtgacagtgcttcggcaggc

SEQ ID NO: 3083 - RNA, 22 nt, synthetic construct
  source 1..22: mol_type = other RNA
gggttccgttgcctatgcccag

SEQ ID NO: 3084 - RNA, 22 nt, synthetic construct
  source 1..22: mol_type = other RNA
ggtacatgagctccaccttgca

SEQ ID NO: 3085 - RNA, 22 nt, synthetic construct
  source 1..22: mol_type = other RNA
ggtactggccagcagccgaggc

SEQ ID NO: 3086 - RNA, 22 nt, synthetic construct
  source 1..22: mol_type = other RNA
ggtagtatggcggtgggtacat

SEQ ID NO: 3087 - RNA, 22 nt, synthetic construct
  source 1..22: mol_type = other RNA
ggtcaactcattccccatcatg

SEQ ID NO: 3088 - RNA, 22 nt, synthetic construct
  source 1..22: mol_type = other RNA
ggtccgggtgacagtgcttcgg

SEQ ID NO: 3089 - RNA, 22 nt, synthetic construct
  source 1..22: mol_type = other RNA
ggtgacagtgcttcggcaggct

SEQ ID NO: 3090 - RNA, 22 nt, synthetic construct
  source 1..22: mol_type = other RNA
ggtgactgaagtctgtgcggca

SEQ ID NO: 3091 - RNA, 22 nt, synthetic construct
  source 1..22: mol_type = other RNA
ggtgagcaaagccatttcactg

SEQ ID NO: 3092 - RNA, 22 nt, synthetic construct
  source 1..22: mol_type = other RNA
ggtgcccgtgcagatggaatca

SEQ ID NO: 3093 - RNA, 22 nt, synthetic construct
  source 1..22: mol_type = other RNA
ggtggagctcatgtacccaccg

SEQ ID NO: 3094 - RNA, 22 nt, synthetic construct
  source 1..22: mol_type = other RNA
ggtgggtacatgagctccacct

SEQ ID NO: 3095 - RNA, 22 nt, synthetic construct
  source 1..22: mol_type = other RNA
ggtgtcaactcagtgaaatggc

SEQ ID NO: 3096 - RNA, 22 nt, synthetic construct
  source 1..22: mol_type = other RNA
ggttcacttgatttccactgga

SEQ ID NO: 3097 - RNA, 22 nt, synthetic construct
  source 1..22: mol_type = other RNA
ggttccgttgcctatgcccagg

SEQ ID NO: 3098 - RNA, 22 nt, synthetic construct
  source 1..22: mol_type = other RNA
ggttgccgcacagacttcagtc

SEQ ID NO: 3099 - RNA, 22 nt, synthetic construct
  source 1..22: mol_type = other RNA
gtaattggtgagcaaagccatt

SEQ ID NO: 3100 - RNA, 22 nt, synthetic construct
  source 1..22: mol_type = other RNA
gtacatgagctccaccttgcag

SEQ ID NO: 3101 - RNA, 22 nt, synthetic construct
  source 1..22: mol_type = other RNA
gtaccacagcaggctgggccac

SEQ ID NO: 3102 - RNA, 22 nt, synthetic construct
  source 1..22: mol_type = other RNA
gtacccaccgccatactacctg

SEQ ID NO: 3103 - RNA, 22 nt, synthetic construct
  source 1..22: mol_type = other RNA
gtactggccagcagccgaggca

SEQ ID NO: 3104 - RNA, 22 nt, synthetic construct
  source 1..22: mol_type = other RNA
gtagagtcccgtgtccatggcc

SEQ ID NO: 3105 - RNA, 22 nt, synthetic construct
  source 1..22: mol_type = other RNA
gtaggttgccgcacagacttca

SEQ ID NO: 3106 - RNA, 22 nt, synthetic construct
  source 1..22: mol_type = other RNA
gtagtatggcggtgggtacatg

SEQ ID NO: 3107 - RNA, 22 nt, synthetic construct
  source 1..22: mol_type = other RNA
gtatgcatctccaggcaaagcc

SEQ ID NO: 3108 - RNA, 22 nt, synthetic construct
  source 1..22: mol_type = other RNA
gtatggcggtgggtacatgagc

SEQ ID NO: 3109 - RNA, 22 nt, synthetic construct
  source 1..22: mol_type = other RNA
gtcaactcagtgaaatggcttt

SEQ ID NO: 3110 - RNA, 22 nt, synthetic construct
  source 1..22: mol_type = other RNA
gtcaactcattccccatcatgt

SEQ ID NO: 3111 - RNA, 22 nt, synthetic construct
  source 1..22: mol_type = other RNA
gtcacccggacctcagtggctt

SEQ ID NO: 3112 - RNA, 22 nt, synthetic construct
  source 1..22: mol_type = other RNA
gtcacctggctgtcagcctgcc

SEQ ID NO: 3113 - RNA, 22 nt, synthetic construct
  source 1..22: mol_type = other RNA
gtcagcctgccgaagcactgtc

SEQ ID NO: 3114 - RNA, 22 nt, synthetic construct
  source 1..22: mol_type = other RNA
gtccatggccctcagtccttgg

SEQ ID NO: 3115 - RNA, 22 nt, synthetic construct
  source 1..22: mol_type = other RNA
gtcccgtgtccatggccctcag

SEQ ID NO: 3116 - RNA, 22 nt, synthetic construct
  source 1..22: mol_type = other RNA
gtccgggtgacagtgcttcggc

SEQ ID NO: 3117 - RNA, 22 nt, synthetic construct
  source 1..22: mol_type = other RNA
gtccttggatagtgaggttcac

SEQ ID NO: 3118 - RNA, 22 nt, synthetic construct
  source 1..22: mol_type = other RNA
gtctgtgcggcaacctacatga

SEQ ID NO: 3119 - RNA, 22 nt, synthetic construct
  source 1..22: mol_type = other RNA
gtgaaatggctttgctcaccaa

SEQ ID NO: 3120 - RNA, 22 nt, synthetic construct
  source 1..22: mol_type = other RNA
gtgaacctcactatccaaggac

SEQ ID NO: 3121 - RNA, 22 nt, synthetic construct
  source 1..22: mol_type = other RNA
gtgacagtgcttcggcaggctg

SEQ ID NO: 3122 - RNA, 22 nt, synthetic construct
  source 1..22: mol_type = other RNA
gtgactgaagtctgtgcggcaa

SEQ ID NO: 3123 - RNA, 22 nt, synthetic construct
  source 1..22: mol_type = other RNA
gtgagcaaagccatttcactga

SEQ ID NO: 3124 - RNA, 22 nt, synthetic construct
  source 1..22: mol_type = other RNA
gtgaggttcacttgatttccac

SEQ ID NO: 3125 - RNA, 22 nt, synthetic construct
  source 1..22: mol_type = other RNA
gtgagtatgcatctccaggcaa

SEQ ID NO: 3126 - RNA, 22 nt, synthetic construct
  source 1..22: mol_type = other RNA
gtgcagatggaatcatctagga

SEQ ID NO: 3127 - RNA, 22 nt, synthetic construct
  source 1..22: mol_type = other RNA
gtgcattgctagcatggaaaag

SEQ ID NO: 3128 - RNA, 22 nt, synthetic construct
  source 1..22: mol_type = other RNA
gtgcccgtgcagatggaatcat

SEQ ID NO: 3129 - RNA, 22 nt, synthetic construct
  source 1..22: mol_type = other RNA
gtgcggcaacctacatgatggg

SEQ ID NO: 3130 - RNA, 22 nt, synthetic construct
  source 1..22: mol_type = other RNA
gtgcttcggcaggctgacagcc

SEQ ID NO: 3131 - RNA, 22 nt, synthetic construct
  source 1..22: mol_type = other RNA
gtggaaatcaagtgaacctcac

SEQ ID NO: 3132 - RNA, 22 nt, synthetic construct
  source 1..22: mol_type = other RNA
gtggagctcatgtacccaccgc

SEQ ID NO: 3133 - RNA, 22 nt, synthetic construct
  source 1..22: mol_type = other RNA
gtggcccagcctgctgtggtac

SEQ ID NO: 3134 - RNA, 22 nt, synthetic construct
  source 1..22: mol_type = other RNA
gtggctttgcctggagatgcat

SEQ ID NO: 3135 - RNA, 22 nt, synthetic construct
  source 1..22: mol_type = other RNA
gtgggtacatgagctccacctt

SEQ ID NO: 3136 - RNA, 22 nt, synthetic construct
  source 1..22: mol_type = other RNA
gtggtactggccagcagccgag

SEQ ID NO: 3137 - RNA, 22 nt, synthetic construct
  source 1..22: mol_type = other RNA
gtgtcaactcagtgaaatggct

SEQ ID NO: 3138 - RNA, 22 nt, synthetic construct
  source 1..22: mol_type = other RNA
gtgtccatggccctcagtcctt

SEQ ID NO: 3139 - RNA, 22 nt, synthetic construct
  source 1..22: mol_type = other RNA
gtgtgagtatgcatctccaggc

SEQ ID NO: 3140 - RNA, 22 nt, synthetic construct
  source 1..22: mol_type = other RNA
gtgtgtgagtatgcatctccag

SEQ ID NO: 3141 - RNA, 22 nt, synthetic construct
  source 1..22: mol_type = other RNA
gttcactgagttccctttggct

SEQ ID NO: 3142 - RNA, 22 nt, synthetic construct
  source 1..22: mol_type = other RNA
gttcacttgatttccactggag

SEQ ID NO: 3143 - RNA, 22 nt, synthetic construct
  source 1..22: mol_type = other RNA
gttccctttggcttttccatgc

SEQ ID NO: 3144 - RNA, 22 nt, synthetic construct
  source 1..22: mol_type = other RNA
gttccgttgcctatgcccaggt

SEQ ID NO: 3145 - RNA, 22 nt, synthetic construct
  source 1..22: mol_type = other RNA
gttgaccttcctagatgattcc

SEQ ID NO: 3146 - RNA, 22 nt, synthetic construct
  source 1..22: mol_type = other RNA
gttgccgcacagacttcagtca

SEQ ID NO: 3147 - RNA, 22 nt, synthetic construct
  source 1..22: mol_type = other RNA
gttgcctatgcccaggtagtat

SEQ ID NO: 3148 - RNA, 22 nt, synthetic construct
  source 1..22: mol_type = other RNA
taaatctgggttccgttgccta

SEQ ID NO: 3149 - RNA, 22 nt, synthetic construct
  source 1..22: mol_type = other RNA
taattggtgagcaaagccattt

SEQ ID NO: 3150 - RNA, 22 nt, synthetic construct
  source 1..22: mol_type = other RNA
tacataaatctgggttccgttg

SEQ ID NO: 3151 - RNA, 22 nt, synthetic construct
  source 1..22: mol_type = other RNA
tacatctgcaaggtggagctca

SEQ ID NO: 3152 - RNA, 22 nt, synthetic construct
  source 1..22: mol_type = other RNA
tacatgagctccaccttgcaga

SEQ ID NO: 3153 - RNA, 22 nt, synthetic construct
  source 1..22: mol_type = other RNA
tacatgatggggaatgagttga

SEQ ID NO: 3154 - RNA, 22 nt, synthetic construct
  source 1..22: mol_type = other RNA
taccacagcaggctgggccacg

SEQ ID NO: 3155 - RNA, 22 nt, synthetic construct
  source 1..22: mol_type = other RNA
tacccaccgccatactacctgg

SEQ ID NO: 3156 - RNA, 22 nt, synthetic construct
  source 1..22: mol_type = other RNA
tacctgggcataggcaacggaa

SEQ ID NO: 3157 - RNA, 22 nt, synthetic construct
  source 1..22: mol_type = other RNA
tactacctgggcataggcaacg

SEQ ID NO: 3158 - RNA, 22 nt, synthetic construct
  source 1..22: mol_type = other RNA
tactcacacacaaagctggcga

SEQ ID NO: 3159 - RNA, 22 nt, synthetic construct
  source 1..22: mol_type = other RNA
tactggccagcagccgaggcat

SEQ ID NO: 3160 - RNA, 22 nt, synthetic construct
  source 1..22: mol_type = other RNA
tagagtcccgtgtccatggccc

SEQ ID NO: 3161 - RNA, 22 nt, synthetic construct
  source 1..22: mol_type = other RNA
tagatgattccatctgcacggg

SEQ ID NO: 3162 - RNA, 22 nt, synthetic construct
  source 1..22: mol_type = other RNA
tagcaatgcacgtggcccagcc

SEQ ID NO: 3163 - RNA, 22 nt, synthetic construct
  source 1..22: mol_type = other RNA
tagcatggaaaagccaaaggga

SEQ ID NO: 3164 - RNA, 22 nt, synthetic construct
  source 1..22: mol_type = other RNA
taggaaggtcaactcattcccc

SEQ ID NO: 3165 - RNA, 22 nt, synthetic construct
  source 1..22: mol_type = other RNA
taggcaacggaacccagattta

SEQ ID NO: 3166 - RNA, 22 nt, synthetic construct
  source 1..22: mol_type = other RNA
taggttgccgcacagacttcag

SEQ ID NO: 3167 - RNA, 22 nt, synthetic construct
  source 1..22: mol_type = other RNA
tagtatggcggtgggtacatga

SEQ ID NO: 3168 - RNA, 22 nt, synthetic construct
  source 1..22: mol_type = other RNA
tagtgaggttcacttgatttcc

SEQ ID NO: 3169 - RNA, 22 nt, synthetic construct
  source 1..22: mol_type = other RNA
tatccaaggactgagggccatg

SEQ ID NO: 3170 - RNA, 22 nt, synthetic construct
  source 1..22: mol_type = other RNA
tatgcatctccaggcaaagcca

SEQ ID NO: 3171 - RNA, 22 nt, synthetic construct
  source 1..22: mol_type = other RNA
tatgcccaggtagtatggcggt

SEQ ID NO: 3172 - RNA, 22 nt, synthetic construct
  source 1..22: mol_type = other RNA
tatggcggtgggtacatgagct

SEQ ID NO: 3173 - RNA, 22 nt, synthetic construct
  source 1..22: mol_type = other RNA
tatgtaattggtgagcaaagcc

SEQ ID NO: 3174 - RNA, 22 nt, synthetic construct
  source 1..22: mol_type = other RNA
tcaactcagtgaaatggctttg

SEQ ID NO: 3175 - RNA, 22 nt, synthetic construct
  source 1..22: mol_type = other RNA
tcaactcattccccatcatgta

SEQ ID NO: 3176 - RNA, 22 nt, synthetic construct
  source 1..22: mol_type = other RNA
tcaagtgaacctcactatccaa

SEQ ID NO: 3177 - RNA, 22 nt, synthetic construct
  source 1..22: mol_type = other RNA
tcacacacaaagctggcgatgc

SEQ ID NO: 3178 - RNA, 22 nt, synthetic construct
  source 1..22: mol_type = other RNA
tcaccaattacataaatctggg

SEQ ID NO: 3179 - RNA, 22 nt, synthetic construct
  source 1..22: mol_type = other RNA
tcacccggacctcagtggcttt

SEQ ID NO: 3180 - RNA, 22 nt, synthetic construct
  source 1..22: mol_type = other RNA
tcacctggctgtcagcctgccg

SEQ ID NO: 3181 - RNA, 22 nt, synthetic construct
  source 1..22: mol_type = other RNA
tcactatccaaggactgagggc

SEQ ID NO: 3182 - RNA, 22 nt, synthetic construct
  source 1..22: mol_type = other RNA
tcactgagttccctttggcttt

SEQ ID NO: 3183 - RNA, 22 nt, synthetic construct
  source 1..22: mol_type = other RNA
tcacttgatttccactggaggt

SEQ ID NO: 3184 - RNA, 22 nt, synthetic construct
  source 1..22: mol_type = other RNA
tcagcctgccgaagcactgtca

SEQ ID NO: 3185 - RNA, 22 nt, synthetic construct
  source 1..22: mol_type = other RNA
tcagtcacctggctgtcagcct

SEQ ID NO: 3186 - RNA, 22 nt, synthetic construct
  source 1..22: mol_type = other RNA
tcagtccttggatagtgaggtt

SEQ ID NO: 3187 - RNA, 22 nt, synthetic construct
  source 1..22: mol_type = other RNA
tcagtgaaatggctttgctcac

SEQ ID NO: 3188 - RNA, 22 nt, synthetic construct
  source 1..22: mol_type = other RNA
tcagtggctttgcctggagatg

SEQ ID NO: 3189 - RNA, 22 nt, synthetic construct
  source 1..22: mol_type = other RNA
tcatctaggaaggtcaactcat

SEQ ID NO: 3190 - RNA, 22 nt, synthetic construct
  source 1..22: mol_type = other RNA
tcatgtacccaccgccatacta

SEQ ID NO: 3191 - RNA, 22 nt, synthetic construct
  source 1..22: mol_type = other RNA
tcatgtaggttgccgcacagac

SEQ ID NO: 3192 - RNA, 22 nt, synthetic construct
  source 1..22: mol_type = other RNA
tcattccccatcatgtaggttg

SEQ ID NO: 3193 - RNA, 22 nt, synthetic construct
  source 1..22: mol_type = other RNA
tccaaggactgagggccatgga

SEQ ID NO: 3194 - RNA, 22 nt, synthetic construct
  source 1..22: mol_type = other RNA
tccaccttgcagatgtagagtc

SEQ ID NO: 3195 - RNA, 22 nt, synthetic construct
  source 1..22: mol_type = other RNA
tccactggaggtgcccgtgcag

SEQ ID NO: 3196 - RNA, 22 nt, synthetic construct
  source 1..22: mol_type = other RNA
tccaggcaaagccactgaggtc

SEQ ID NO: 3197 - RNA, 22 nt, synthetic construct
  source 1..22: mol_type = other RNA
tccagtggaaatcaagtgaacc

SEQ ID NO: 3198 - RNA, 22 nt, synthetic construct
  source 1..22: mol_type = other RNA
tccatctgcacgggcacctcca

SEQ ID NO: 3199 - RNA, 22 nt, synthetic construct
  source 1..22: mol_type = other RNA
tccatgctagcaatgcacgtgg

SEQ ID NO: 3200 - RNA, 22 nt, synthetic construct
  source 1..22: mol_type = other RNA
tccatggccctcagtccttgga

SEQ ID NO: 3201 - RNA, 22 nt, synthetic construct
  source 1..22: mol_type = other RNA
tccccatcatgtaggttgccgc

SEQ ID NO: 3202 - RNA, 22 nt, synthetic construct
  source 1..22: mol_type = other RNA
tcccgtgtccatggccctcagt

SEQ ID NO: 3203 - RNA, 22 nt, synthetic construct
  source 1..22: mol_type = other RNA
tccctttggcttttccatgcta

SEQ ID NO: 3204 - RNA, 22 nt, synthetic construct
  source 1..22: mol_type = other RNA
tccgggtgacagtgcttcggca

SEQ ID NO: 3205 - RNA, 22 nt, synthetic construct
  source 1..22: mol_type = other RNA
tccgttgcctatgcccaggtag

SEQ ID NO: 3206 - RNA, 22 nt, synthetic construct
  source 1..22: mol_type = other RNA
tcctagatgattccatctgcac

SEQ ID NO: 3207 - RNA, 22 nt, synthetic construct
  source 1..22: mol_type = other RNA
tccttggatagtgaggttcact

SEQ ID NO: 3208 - RNA, 22 nt, synthetic construct
  source 1..22: mol_type = other RNA
tcgccagctttgtgtgtgagta

SEQ ID NO: 3209 - RNA, 22 nt, synthetic construct
  source 1..22: mol_type = other RNA
tcggcaggctgacagccaggtg

SEQ ID NO: 3210 - RNA, 22 nt, synthetic construct
  source 1..22: mol_type = other RNA
tcggctgctggccagtaccaca

SEQ ID NO: 3211 - RNA, 22 nt, synthetic construct
  source 1..22: mol_type = other RNA
tctacatctgcaaggtggagct

SEQ ID NO: 3212 - RNA, 22 nt, synthetic construct
  source 1..22: mol_type = other RNA
tctaggaaggtcaactcattcc

SEQ ID NO: 3213 - RNA, 22 nt, synthetic construct
  source 1..22: mol_type = other RNA
tctccaggcaaagccactgagg

SEQ ID NO: 3214 - RNA, 22 nt, synthetic construct
  source 1..22: mol_type = other RNA
tctgcaaggtggagctcatgta

SEQ ID NO: 3215 - RNA, 22 nt, synthetic construct
  source 1..22: mol_type = other RNA
tctgcacgggcacctccagtgg

SEQ ID NO: 3216 - RNA, 22 nt, synthetic construct
  source 1..22: mol_type = other RNA
tctgggttccgttgcctatgcc

SEQ ID NO: 3217 - RNA, 22 nt, synthetic construct
  source 1..22: mol_type = other RNA
tctgtgcggcaacctacatgat

SEQ ID NO: 3218 - RNA, 22 nt, synthetic construct
  source 1..22: mol_type = other RNA
tgaaatggctttgctcaccaat

SEQ ID NO: 3219 - RNA, 22 nt, synthetic construct
  source 1..22: mol_type = other RNA
tgaacctcactatccaaggact

SEQ ID NO: 3220 - RNA, 22 nt, synthetic construct
  source 1..22: mol_type = other RNA
tgaagtctgtgcggcaacctac

SEQ ID NO: 3221 - RNA, 22 nt, synthetic construct
  source 1..22: mol_type = other RNA
tgacagccaggtgactgaagtc

SEQ ID NO: 3222 - RNA, 22 nt, synthetic construct
  source 1..22: mol_type = other RNA
tgacagtgcttcggcaggctga

SEQ ID NO: 3223 - RNA, 22 nt, synthetic construct
  source 1..22: mol_type = other RNA
tgaccttcctagatgattccat

SEQ ID NO: 3224 - RNA, 22 nt, synthetic construct
  source 1..22: mol_type = other RNA
tgactgaagtctgtgcggcaac

SEQ ID NO: 3225 - RNA, 22 nt, synthetic construct
  source 1..22: mol_type = other RNA
tgagcaaagccatttcactgag

SEQ ID NO: 3226 - RNA, 22 nt, synthetic construct
  source 1..22: mol_type = other RNA
tgagctccaccttgcagatgta

SEQ ID NO: 3227 - RNA, 22 nt, synthetic construct
  source 1..22: mol_type = other RNA
tgagggccatggacacgggact

SEQ ID NO: 3228 - RNA, 22 nt, synthetic construct
  source 1..22: mol_type = other RNA
tgaggtccgggtgacagtgctt

SEQ ID NO: 3229 - RNA, 22 nt, synthetic construct
  source 1..22: mol_type = other RNA
tgaggttcacttgatttccact

SEQ ID NO: 3230 - RNA, 22 nt, synthetic construct
  source 1..22: mol_type = other RNA
tgagtatgcatctccaggcaaa

SEQ ID NO: 3231 - RNA, 22 nt, synthetic construct
  source 1..22: mol_type = other RNA
tgagttcactgagttccctttg

SEQ ID NO: 3232 - RNA, 22 nt, synthetic construct
  source 1..22: mol_type = other RNA
tgagttccctttggcttttcca

SEQ ID NO: 3233 - RNA, 22 nt, synthetic construct
  source 1..22: mol_type = other RNA
tgagttgaccttcctagatgat

SEQ ID NO: 3234 - RNA, 22 nt, synthetic construct
  source 1..22: mol_type = other RNA
tgatggggaatgagttgacctt

SEQ ID NO: 3235 - RNA, 22 nt, synthetic construct
  source 1..22: mol_type = other RNA
tgattccatctgcacgggcacc

SEQ ID NO: 3236 - RNA, 22 nt, synthetic construct
  source 1..22: mol_type = other RNA
tgatttccactggaggtgcccg

SEQ ID NO: 3237 - RNA, 22 nt, synthetic construct
  source 1..22: mol_type = other RNA
tgcaacaggtgtcaactcagtg

SEQ ID NO: 3238 - RNA, 22 nt, synthetic construct
  source 1..22: mol_type = other RNA
tgcaaggtggagctcatgtacc

SEQ ID NO: 3239 - RNA, 22 nt, synthetic construct
  source 1..22: mol_type = other RNA
tgcacgggcacctccagtggaa

SEQ ID NO: 3240 - RNA, 22 nt, synthetic construct
  source 1..22: mol_type = other RNA
tgcacgtggcccagcctgctgt

SEQ ID NO: 3241 - RNA, 22 nt, synthetic construct
  source 1..22: mol_type = other RNA
tgcagatggaatcatctaggaa

SEQ ID NO: 3242 - RNA, 22 nt, synthetic construct
  source 1..22: mol_type = other RNA
tgcagatgtagagtcccgtgtc

SEQ ID NO: 3243 - RNA, 22 nt, synthetic construct
  source 1..22: mol_type = other RNA
tgcatactcacacacaaagctg

SEQ ID NO: 3244 - RNA, 22 nt, synthetic construct
  source 1..22: mol_type = other RNA
tgcatctccaggcaaagccact

SEQ ID NO: 3245 - RNA, 22 nt, synthetic construct
  source 1..22: mol_type = other RNA
tgcattgctagcatggaaaagc

SEQ ID NO: 3246 - RNA, 22 nt, synthetic construct
  source 1..22: mol_type = other RNA
tgcccaggtagtatggcggtgg

SEQ ID NO: 3247 - RNA, 22 nt, synthetic construct
  source 1..22: mol_type = other RNA
tgcccgtgcagatggaatcatc

SEQ ID NO: 3248 - RNA, 22 nt, synthetic construct
  source 1..22: mol_type = other RNA
tgccgaagcactgtcacccgga

SEQ ID NO: 3249 - RNA, 22 nt, synthetic construct
  source 1..22: mol_type = other RNA
tgccgcacagacttcagtcacc

SEQ ID NO: 3250 - RNA, 22 nt, synthetic construct
  source 1..22: mol_type = other RNA
tgcctatgcccaggtagtatgg

SEQ ID NO: 3251 - RNA, 22 nt, synthetic construct
  source 1..22: mol_type = other RNA
tgcctcggctgctggccagtac

SEQ ID NO: 3252 - RNA, 22 nt, synthetic construct
  source 1..22: mol_type = other RNA
tgcctggagatgcatactcaca

SEQ ID NO: 3253 - RNA, 22 nt, synthetic construct
  source 1..22: mol_type = other RNA
tgcggcaacctacatgatgggg

SEQ ID NO: 3254 - RNA, 22 nt, synthetic construct
  source 1..22: mol_type = other RNA
tgctagcaatgcacgtggccca

SEQ ID NO: 3255 - RNA, 22 nt, synthetic construct
  source 1..22: mol_type = other RNA
tgctagcatggaaaagccaaag

SEQ ID NO: 3256 - RNA, 22 nt, synthetic construct
  source 1..22: mol_type = other RNA
tgctcaccaattacataaatct

SEQ ID NO: 3257 - RNA, 22 nt, synthetic construct
  source 1..22: mol_type = other RNA
tgctggccagtaccacagcagg

SEQ ID NO: 3258 - RNA, 22 nt, synthetic construct
  source 1..22: mol_type = other RNA
tgctgtggtactggccagcagc

SEQ ID NO: 3259 - RNA, 22 nt, synthetic construct
  source 1..22: mol_type = other RNA
tgcttcggcaggctgacagcca

SEQ ID NO: 3260 - RNA, 22 nt, synthetic construct
  source 1..22: mol_type = other RNA
tggaaaagccaaagggaactca

SEQ ID NO: 3261 - RNA, 22 nt, synthetic construct
  source 1..22: mol_type = other RNA
tggaaatcaagtgaacctcact

SEQ ID NO: 3262 - RNA, 22 nt, synthetic construct
  source 1..22: mol_type = other RNA
tggaatcatctaggaaggtcaa

SEQ ID NO: 3263 - RNA, 22 nt, synthetic construct
  source 1..22: mol_type = other RNA
tggacacgggactctacatctg

SEQ ID NO: 3264 - RNA, 22 nt, synthetic construct
  source 1..22: mol_type = other RNA
tggagatgcatactcacacaca

SEQ ID NO: 3265 - RNA, 22 nt, synthetic construct
  source 1..22: mol_type = other RNA
tggagctcatgtacccaccgcc

SEQ ID NO: 3266 - RNA, 22 nt, synthetic construct
  source 1..22: mol_type = other RNA
tggaggtgcccgtgcagatgga

SEQ ID NO: 3267 - RNA, 22 nt, synthetic construct
  source 1..22: mol_type = other RNA
tggatagtgaggttcacttgat

SEQ ID NO: 3268 - RNA, 22 nt, synthetic construct
  source 1..22: mol_type = other RNA
tggccagcagccgaggcatcgc

SEQ ID NO: 3269 - RNA, 22 nt, synthetic construct
  source 1..22: mol_type = other RNA
tggccagtaccacagcaggctg

SEQ ID NO: 3270 - RNA, 22 nt, synthetic construct
  source 1..22: mol_type = other RNA
tggcccagcctgctgtggtact

SEQ ID NO: 3271 - RNA, 22 nt, synthetic construct
  source 1..22: mol_type = other RNA
tggccctcagtccttggatagt

SEQ ID NO: 3272 - RNA, 22 nt, synthetic construct
  source 1..22: mol_type = other RNA
tggcgatgcctcggctgctggc

SEQ ID NO: 3273 - RNA, 22 nt, synthetic construct
  source 1..22: mol_type = other RNA
tggcggtgggtacatgagctcc

SEQ ID NO: 3274 - RNA, 22 nt, synthetic construct
  source 1..22: mol_type = other RNA
tggctgtcagcctgccgaagca

SEQ ID NO: 3275 - RNA, 22 nt, synthetic construct
  source 1..22: mol_type = other RNA
tggctttgcctggagatgcata

SEQ ID NO: 3276 - RNA, 22 nt, synthetic construct
  source 1..22: mol_type = other RNA
tggctttgctcaccaattacat

SEQ ID NO: 3277 - RNA, 22 nt, synthetic construct
  source 1..22: mol_type = other RNA
tggcttttccatgctagcaatg

SEQ ID NO: 3278 - RNA, 22 nt, synthetic construct
  source 1..22: mol_type = other RNA
tgggcataggcaacggaaccca

SEQ ID NO: 3279 - RNA, 22 nt, synthetic construct
  source 1..22: mol_type = other RNA
tgggccacgtgcattgctagca

SEQ ID NO: 3280 - RNA, 22 nt, synthetic construct
  source 1..22: mol_type = other RNA
tggggaatgagttgaccttcct

SEQ ID NO: 3281 - RNA, 22 nt, synthetic construct
  source 1..22: mol_type = other RNA
tgggtacatgagctccaccttg

SEQ ID NO: 3282 - RNA, 22 nt, synthetic construct
  source 1..22: mol_type = other RNA
tgggttccgttgcctatgccca

SEQ ID NO: 3283 - RNA, 22 nt, synthetic construct
  source 1..22: mol_type = other RNA
tggtactggccagcagccgagg

SEQ ID NO: 3284 - RNA, 22 nt, synthetic construct
  source 1..22: mol_type = other RNA
tggtgagcaaagccatttcact

SEQ ID NO: 3285 - RNA, 22 nt, synthetic construct
  source 1..22: mol_type = other RNA
tgtaattggtgagcaaagccat

SEQ ID NO: 3286 - RNA, 22 nt, synthetic construct
  source 1..22: mol_type = other RNA
tgtacccaccgccatactacct

SEQ ID NO: 3287 - RNA, 22 nt, synthetic construct
  source 1..22: mol_type = other RNA
tgtagagtcccgtgtccatggc

SEQ ID NO: 3288 - RNA, 22 nt, synthetic construct
  source 1..22: mol_type = other RNA
tgtaggttgccgcacagacttc

SEQ ID NO: 3289 - RNA, 22 nt, synthetic construct
  source 1..22: mol_type = other RNA
tgtcaactcagtgaaatggctt

SEQ ID NO: 3290 - RNA, 22 nt, synthetic construct
  source 1..22: mol_type = other RNA
tgtcacccggacctcagtggct

SEQ ID NO: 3291 - RNA, 22 nt, synthetic construct
  source 1..22: mol_type = other RNA
tgtcagcctgccgaagcactgt

SEQ ID NO: 3292 - RNA, 22 nt, synthetic construct
  source 1..22: mol_type = other RNA
tgtccatggccctcagtccttg

SEQ ID NO: 3293 - RNA, 22 nt, synthetic construct
  source 1..22: mol_type = other RNA
tgtgagtatgcatctccaggca

SEQ ID NO: 3294 - RNA, 22 nt, synthetic construct
  source 1..22: mol_type = other RNA
tgtgcggcaacctacatgatgg

SEQ ID NO: 3295 - RNA, 22 nt, synthetic construct
  source 1..22: mol_type = other RNA
tgtggtactggccagcagccga

SEQ ID NO: 3296 - RNA, 22 nt, synthetic construct
  source 1..22: mol_type = other RNA
tgtgtgagtatgcatctccagg

SEQ ID NO: 3297 - RNA, 22 nt, synthetic construct
  source 1..22: mol_type = other RNA
tgtgtgtgagtatgcatctcca

SEQ ID NO: 3298 - RNA, 22 nt, synthetic construct
  source 1..22: mol_type = other RNA
ttacataaatctgggttccgtt

SEQ ID NO: 3299 - RNA, 22 nt, synthetic construct
  source 1..22: mol_type = other RNA
ttatgtaattggtgagcaaagc

SEQ ID NO: 3300 - RNA, 22 nt, synthetic construct
  source 1..22: mol_type = other RNA
ttcactgagttccctttggctt

SEQ ID NO: 3301 - RNA, 22 nt, synthetic construct
  source 1..22: mol_type = other RNA
ttcacttgatttccactggagg

SEQ ID NO: 3302 - RNA, 22 nt, synthetic construct
  source 1..22: mol_type = other RNA
ttcagtcacctggctgtcagcc

SEQ ID NO: 3303 - RNA, 22 nt, synthetic construct
  source 1..22: mol_type = other RNA
ttccactggaggtgcccgtgca

SEQ ID NO: 3304 - RNA, 22 nt, synthetic construct
  source 1..22: mol_type = other RNA
ttccatctgcacgggcacctcc

SEQ ID NO: 3305 - RNA, 22 nt, synthetic construct
  source 1..22: mol_type = other RNA
ttccatgctagcaatgcacgtg

SEQ ID NO: 3306 - RNA, 22 nt, synthetic construct
  source 1..22: mol_type = other RNA
ttccccatcatgtaggttgccg

SEQ ID NO: 3307 - RNA, 22 nt, synthetic construct
  source 1..22: mol_type = other RNA
ttccctttggcttttccatgct

SEQ ID NO: 3308 - RNA, 22 nt, synthetic construct
  source 1..22: mol_type = other RNA
ttccgttgcctatgcccaggta

SEQ ID NO: 3309 - RNA, 22 nt, synthetic construct
  source 1..22: mol_type = other RNA
ttcctagatgattccatctgca

SEQ ID NO: 3310 - RNA, 22 nt, synthetic construct
  source 1..22: mol_type = other RNA
ttcggcaggctgacagccaggt

SEQ ID NO: 3311 - RNA, 22 nt, synthetic construct
  source 1..22: mol_type = other RNA
ttgaccttcctagatgattcca

SEQ ID NO: 3312 - RNA, 22 nt, synthetic construct
  source 1..22: mol_type = other RNA
ttgatttccactggaggtgccc

SEQ ID NO: 3313 - RNA, 22 nt, synthetic construct
  source 1..22: mol_type = other RNA
ttgcagatgtagagtcccgtgt

SEQ ID NO: 3314 - RNA, 22 nt, synthetic construct
  source 1..22: mol_type = other RNA
ttgccgcacagacttcagtcac

SEQ ID NO: 3315 - RNA, 22 nt, synthetic construct
  source 1..22: mol_type = other RNA
ttgcctatgcccaggtagtatg

SEQ ID NO: 3316 - RNA, 22 nt, synthetic construct
  source 1..22: mol_type = other RNA
ttgcctggagatgcatactcac

SEQ ID NO: 3317 - RNA, 22 nt, synthetic construct
  source 1..22: mol_type = other RNA
ttgctagcatggaaaagccaaa

SEQ ID NO: 3318 - RNA, 22 nt, synthetic construct
  source 1..22: mol_type = other RNA
ttgctcaccaattacataaatc

SEQ ID NO: 3319 - RNA, 22 nt, synthetic construct
  source 1..22: mol_type = other RNA
ttggatagtgaggttcacttga

SEQ ID NO: 3320 - RNA, 22 nt, synthetic construct
  source 1..22: mol_type = other RNA
ttggcttttccatgctagcaat

SEQ ID NO: 3321 - RNA, 22 nt, synthetic construct
  source 1..22: mol_type = other RNA
ttggtgagcaaagccatttcac

SEQ ID NO: 3322 - RNA, 22 nt, synthetic construct
  source 1..22: mol_type = other RNA
ttgtgtgtgagtatgcatctcc

SEQ ID NO: 3323 - RNA, 22 nt, synthetic construct
  source 1..22: mol_type = other RNA
tttatgtaattggtgagcaaag

SEQ ID NO: 3324 - RNA, 22 nt, synthetic construct
  source 1..22: mol_type = other RNA
tttccactggaggtgcccgtgc

SEQ ID NO: 3325 - RNA, 22 nt, synthetic construct
  source 1..22: mol_type = other RNA
tttccatgctagcaatgcacgt

SEQ ID NO: 3326 - RNA, 22 nt, synthetic construct
  source 1..22: mol_type = other RNA
tttgcctggagatgcatactca

SEQ ID NO: 3327 - RNA, 22 nt, synthetic construct
  source 1..22: mol_type = other RNA
tttgctcaccaattacataaat

SEQ ID NO: 3328 - RNA, 22 nt, synthetic construct
  source 1..22: mol_type = other RNA
tttggcttttccatgctagcaa

SEQ ID NO: 3329 - RNA, 22 nt, synthetic construct
  source 1..22: mol_type = other RNA
tttgtgtgtgagtatgcatctc

SEQ ID NO: 3330 - RNA, 22 nt, synthetic construct
  source 1..22: mol_type = other RNA
ttttccatgctagcaatgcacg

SEQ ID NO: 3331 - RNA, 20 nt, synthetic construct
  source 1..20: mol_type = other RNA
aaaaaacaaccccgaactaa

SEQ ID NO: 3332 - RNA, 20 nt, synthetic construct
  source 1..20: mol_type = other RNA
aaaaacaaccccgaactaac

SEQ ID NO: 3333 - RNA, 20 nt, synthetic construct
  source 1..20: mol_type = other RNA
aaaacaaccccgaactaact

SEQ ID NO: 3334 - RNA, 20 nt, synthetic construct
  source 1..20: mol_type = other RNA
aaaatggtgagtgtggtgct

SEQ ID NO: 3335 - RNA, 20 nt, synthetic construct
  source 1..20: mol_type = other RNA
aaacaaccccgaactaactg

SEQ ID NO: 3336 - RNA, 20 nt, synthetic construct
  source 1..20: mol_type = other RNA
aaacagctgtgaggagaaag

SEQ ID NO: 3337 - RNA, 20 nt, synthetic construct
  source 1..20: mol_type = other RNA
aaagaaacagctgtgaggag

SEQ ID NO: 3338 - RNA, 20 nt, synthetic construct
  source 1..20: mol_type = other RNA
aaatggtgagtgtggtgctg

SEQ ID NO: 3339 - RNA, 20 nt, synthetic construct
  source 1..20: mol_type = other RNA
aacaaccccgaactaactgc

SEQ ID NO: 3340 - RNA, 20 nt, synthetic construct
  source 1..20: mol_type = other RNA
aacagctgtgaggagaaagc

SEQ ID NO: 3341 - RNA, 20 nt, synthetic construct
  source 1..20: mol_type = other RNA
aaccccgaactaactgctgc

SEQ ID NO: 3342 - RNA, 20 nt, synthetic construct
  source 1..20: mol_type = other RNA
aaccgtgcccagattctgac

SEQ ID NO: 3343 - RNA, 20 nt, synthetic construct
  source 1..20: mol_type = other RNA
aagaaacagctgtgaggaga

SEQ ID NO: 3344 - RNA, 20 nt, synthetic construct
  source 1..20: mol_type = other RNA
aagtcagaatctgggcacgg

SEQ ID NO: 3345 - RNA, 20 nt, synthetic construct
  source 1..20: mol_type = other RNA
aatctgggcacggttctgga

SEQ ID NO: 3346 - RNA, 20 nt, synthetic construct
  source 1..20: mol_type = other RNA
aatggtgagtgtggtgctga

SEQ ID NO: 3347 - RNA, 20 nt, synthetic construct
  source 1..20: mol_type = other RNA
acaaccccgaactaactgct

SEQ ID NO: 3348 - RNA, 20 nt, synthetic construct
  source 1..20: mol_type = other RNA
acactcaccattttgctcaa

SEQ ID NO: 3349 - RNA, 20 nt, synthetic construct
  source 1..20: mol_type = other RNA
acagctgtgaggagaaagct

SEQ ID NO: 3350 - RNA, 20 nt, synthetic construct
  source 1..20: mol_type = other RNA
acatggtgcaccatcagcac

SEQ ID NO: 3351 - RNA, 20 nt, synthetic construct
  source 1..20: mol_type = other RNA
accacactcaccattttgct

SEQ ID NO: 3352 - RNA, 20 nt, synthetic construct
  source 1..20: mol_type = other RNA
accatcagcaccacactcac

SEQ ID NO: 3353 - RNA, 20 nt, synthetic construct
  source 1..20: mol_type = other RNA
accccgaactaactgctgca

SEQ ID NO: 3354 - RNA, 20 nt, synthetic construct
  source 1..20: mol_type = other RNA
accgtgcccagattctgact

SEQ ID NO: 3355 - RNA, 20 nt, synthetic construct
  source 1..20: mol_type = other RNA
acggttctggatctgcaaca

SEQ ID NO: 3356 - RNA, 20 nt, synthetic construct
  source 1..20: mol_type = other RNA
actcaccattttgctcaaag

SEQ ID NO: 3357 - RNA, 20 nt, synthetic construct
  source 1..20: mol_type = other RNA
agaaacagctgtgaggagaa

SEQ ID NO: 3358 - RNA, 20 nt, synthetic construct
  source 1..20: mol_type = other RNA
agaaccgtgcccagattctg

SEQ ID NO: 3359 - RNA, 20 nt, synthetic construct
  source 1..20: mol_type = other RNA
agaatctgggcacggttctg

SEQ ID NO: 3360 - RNA, 20 nt, synthetic construct
  source 1..20: mol_type = other RNA
agacatggtgcaccatcagc

SEQ ID NO: 3361 - RNA, 20 nt, synthetic construct
  source 1..20: mol_type = other RNA
agaggaggaagtcagaatct

SEQ ID NO: 3362 - RNA, 20 nt, synthetic construct
  source 1..20: mol_type = other RNA
agatccagaaccgtgcccag

SEQ ID NO: 3363 - RNA, 20 nt, synthetic construct
  source 1..20: mol_type = other RNA
agcaaaatggtgagtgtggt

SEQ ID NO: 3364 - RNA, 20 nt, synthetic construct
  source 1..20: mol_type = other RNA
agcaccacactcaccatttt

SEQ ID NO: 3365 - RNA, 20 nt, synthetic construct
  source 1..20: mol_type = other RNA
agcagttagttcggggttgt

SEQ ID NO: 3366 - RNA, 20 nt, synthetic construct
  source 1..20: mol_type = other RNA
agctgtgaggagaaagctat

SEQ ID NO: 3367 - RNA, 20 nt, synthetic construct
  source 1..20: mol_type = other RNA
agctgtttctttgagcaaaa

SEQ ID NO: 3368 - RNA, 20 nt, synthetic construct
  source 1..20: mol_type = other RNA
agctttctcctcacagctgt

SEQ ID NO: 3369 - RNA, 20 nt, synthetic construct
  source 1..20: mol_type = other RNA
aggaagtcagaatctgggca

SEQ ID NO: 3370 - RNA, 20 nt, synthetic construct
  source 1..20: mol_type = other RNA
aggaggaagtcagaatctgg

SEQ ID NO: 3371 - RNA, 20 nt, synthetic construct
  source 1..20: mol_type = other RNA
aggctctgctttgttttctg

SEQ ID NO: 3372 - RNA, 20 nt, synthetic construct
  source 1..20: mol_type = other RNA
agggaggctctgctttgttt

SEQ ID NO: 3373 - RNA, 20 nt, synthetic construct
  source 1..20: mol_type = other RNA
agtcagaatctgggcacggt

SEQ ID NO: 3374 - RNA, 20 nt, synthetic construct
  source 1..20: mol_type = other RNA
agtgtggtgctgatggtgca

SEQ ID NO: 3375 - RNA, 20 nt, synthetic construct
  source 1..20: mol_type = other RNA
agttagttcggggttgtttt

SEQ ID NO: 3376 - RNA, 20 nt, synthetic construct
  source 1..20: mol_type = other RNA
atagctttctcctcacagct

SEQ ID NO: 3377 - RNA, 20 nt, synthetic construct
  source 1..20: mol_type = other RNA
atcagcaccacactcaccat

SEQ ID NO: 3378 - RNA, 20 nt, synthetic construct
  source 1..20: mol_type = other RNA
atccagaaccgtgcccagat

SEQ ID NO: 3379 - RNA, 20 nt, synthetic construct
  source 1..20: mol_type = other RNA
atccagaggaggaagtcaga

SEQ ID NO: 3380 - RNA, 20 nt, synthetic construct
  source 1..20: mol_type = other RNA
atccttgcagcagttagttc

SEQ ID NO: 3381 - RNA, 20 nt, synthetic construct
  source 1..20: mol_type = other RNA
atctgcaacagaaaacaaag

SEQ ID NO: 3382 - RNA, 20 nt, synthetic construct
  source 1..20: mol_type = other RNA
atctgggcacggttctggat

SEQ ID NO: 3383 - RNA, 20 nt, synthetic construct
  source 1..20: mol_type = other RNA
atggtgagtgtggtgctgat

SEQ ID NO: 3384 - RNA, 20 nt, synthetic construct
  source 1..20: mol_type = other RNA
atggtgcaccatcagcacca

SEQ ID NO: 3385 - RNA, 20 nt, synthetic construct
  source 1..20: mol_type = other RNA
caaaatggtgagtgtggtgc

SEQ ID NO: 3386 - RNA, 20 nt, synthetic construct
  source 1..20: mol_type = other RNA
caaagaaacagctgtgagga

SEQ ID NO: 3387 - RNA, 20 nt, synthetic construct
  source 1..20: mol_type = other RNA
caacagaaaacaaagcagag

SEQ ID NO: 3388 - RNA, 20 nt, synthetic construct
  source 1..20: mol_type = other RNA
caaccccgaactaactgctg

SEQ ID NO: 3389 - RNA, 20 nt, synthetic construct
  source 1..20: mol_type = other RNA
cacactcaccattttgctca

SEQ ID NO: 3390 - RNA, 20 nt, synthetic construct
  source 1..20: mol_type = other RNA
caccacactcaccattttgc

SEQ ID NO: 3391 - RNA, 20 nt, synthetic construct
  source 1..20: mol_type = other RNA
caccatcagcaccacactca

SEQ ID NO: 3392 - RNA, 20 nt, synthetic construct
  source 1..20: mol_type = other RNA
cacggttctggatctgcaac

SEQ ID NO: 3393 - RNA, 20 nt, synthetic construct
  source 1..20: mol_type = other RNA
cactcaccattttgctcaaa

SEQ ID NO: 3394 - RNA, 20 nt, synthetic construct
  source 1..20: mol_type = other RNA
cagaaccgtgcccagattct

SEQ ID NO: 3395 - RNA, 20 nt, synthetic construct
  source 1..20: mol_type = other RNA
cagaatctgggcacggttct

SEQ ID NO: 3396 - RNA, 20 nt, synthetic construct
  source 1..20: mol_type = other RNA
cagacatggtgcaccatcag

SEQ ID NO: 3397 - RNA, 20 nt, synthetic construct
  source 1..20: mol_type = other RNA
cagaggaggaagtcagaatc

SEQ ID NO: 3398 - RNA, 20 nt, synthetic construct
  source 1..20: mol_type = other RNA
cagatccagaaccgtgccca

SEQ ID NO: 3399 - RNA, 20 nt, synthetic construct
  source 1..20: mol_type = other RNA
cagcaccacactcaccattt

SEQ ID NO: 3400 - RNA, 20 nt, synthetic construct
  source 1..20: mol_type = other RNA
cagcagttagttcggggttg

SEQ ID NO: 3401 - RNA, 20 nt, synthetic construct
  source 1..20: mol_type = other RNA
cagctgtgaggagaaagcta

SEQ ID NO: 3402 - RNA, 20 nt, synthetic construct
  source 1..20: mol_type = other RNA
cagctgtttctttgagcaaa

SEQ ID NO: 3403 - RNA, 20 nt, synthetic construct
  source 1..20: mol_type = other RNA
cagggaggctctgctttgtt

SEQ ID NO: 3404 - RNA, 20 nt, synthetic construct
  source 1..20: mol_type = other RNA
cagttagttcggggttgttt

SEQ ID NO: 3405 - RNA, 20 nt, synthetic construct
  source 1..20: mol_type = other RNA
catcagcaccacactcacca

SEQ ID NO: 3406 - RNA, 20 nt, synthetic construct
  source 1..20: mol_type = other RNA
catggtgcaccatcagcacc

SEQ ID NO: 3407 - RNA, 20 nt, synthetic construct
  source 1..20: mol_type = other RNA
ccacactcaccattttgctc

SEQ ID NO: 3408 - RNA, 20 nt, synthetic construct
  source 1..20: mol_type = other RNA
ccagaaccgtgcccagattc

SEQ ID NO: 3409 - RNA, 20 nt, synthetic construct
  source 1..20: mol_type = other RNA
ccagaggaggaagtcagaat

SEQ ID NO: 3410 - RNA, 20 nt, synthetic construct
  source 1..20: mol_type = other RNA
ccagattctgacttcctcct

SEQ ID NO: 3411 - RNA, 20 nt, synthetic construct
  source 1..20: mol_type = other RNA
ccatcagcaccacactcacc

SEQ ID NO: 3412 - RNA, 20 nt, synthetic construct
  source 1..20: mol_type = other RNA
cccagattctgacttcctcc

SEQ ID NO: 3413 - RNA, 20 nt, synthetic construct
  source 1..20: mol_type = other RNA
ccccatcagacatggtgcac

SEQ ID NO: 3414 - RNA, 20 nt, synthetic construct
  source 1..20: mol_type = other RNA
ccccgaactaactgctgcaa

SEQ ID NO: 3415 - RNA, 20 nt, synthetic construct
  source 1..20: mol_type = other RNA
cccgaactaactgctgcaag

SEQ ID NO: 3416 - RNA, 20 nt, synthetic construct
  source 1..20: mol_type = other RNA
ccgaactaactgctgcaagg

SEQ ID NO: 3417 - RNA, 20 nt, synthetic construct
  source 1..20: mol_type = other RNA
ccgtgcccagattctgactt

SEQ ID NO: 3418 - RNA, 20 nt, synthetic construct
  source 1..20: mol_type = other RNA
cctctggatccttgcagcag

SEQ ID NO: 3419 - RNA, 20 nt, synthetic construct
  source 1..20: mol_type = other RNA
ccttgcagcagttagttcgg

SEQ ID NO: 3420 - RNA, 20 nt, synthetic construct
  source 1..20: mol_type = other RNA
cgaactaactgctgcaagga

SEQ ID NO: 3421 - RNA, 20 nt, synthetic construct
  source 1..20: mol_type = other RNA
cggttctggatctgcaacag

SEQ ID NO: 3422 - RNA, 20 nt, synthetic construct
  source 1..20: mol_type = other RNA
cgtgcccagattctgacttc

SEQ ID NO: 3423 - RNA, 20 nt, synthetic construct
  source 1..20: mol_type = other RNA
ctcaaagaaacagctgtgag

SEQ ID NO: 3424 - RNA, 20 nt, synthetic construct
  source 1..20: mol_type = other RNA
ctcaccattttgctcaaaga

SEQ ID NO: 3425 - RNA, 20 nt, synthetic construct
  source 1..20: mol_type = other RNA
ctctgctttgttttctgttg

SEQ ID NO: 3426 - RNA, 20 nt, synthetic construct
  source 1..20: mol_type = other RNA
ctctggatccttgcagcagt

SEQ ID NO: 3427 - RNA, 20 nt, synthetic construct
  source 1..20: mol_type = other RNA
ctgcaacagaaaacaaagca

SEQ ID NO: 3428 - RNA, 20 nt, synthetic construct
  source 1..20: mol_type = other RNA
ctgctttgttttctgttgca

SEQ ID NO: 3429 - RNA, 20 nt, synthetic construct
  source 1..20: mol_type = other RNA
ctggatccttgcagcagtta

SEQ ID NO: 3430 - RNA, 20 nt, synthetic construct
  source 1..20: mol_type = other RNA
ctggatctgcaacagaaaac

SEQ ID NO: 3431 - RNA, 20 nt, synthetic construct
  source 1..20: mol_type = other RNA
ctgggcacggttctggatct

SEQ ID NO: 3432 - RNA, 20 nt, synthetic construct
  source 1..20: mol_type = other RNA
ctgtgaggagaaagctataa

SEQ ID NO: 3433 - RNA, 20 nt, synthetic construct
  source 1..20: mol_type = other RNA
ctgttgcagatccagaaccg

SEQ ID NO: 3434 - RNA, 20 nt, synthetic construct
  source 1..20: mol_type = other RNA
ctgtttctttgagcaaaatg

SEQ ID NO: 3435 - RNA, 20 nt, synthetic construct
  source 1..20: mol_type = other RNA
cttgcagcagttagttcggg

SEQ ID NO: 3436 - RNA, 20 nt, synthetic construct
  source 1..20: mol_type = other RNA
ctttctcctcacagctgttt

SEQ ID NO: 3437 - RNA, 20 nt, synthetic construct
  source 1..20: mol_type = other RNA
ctttgagcaaaatggtgagt

SEQ ID NO: 3438 - RNA, 20 nt, synthetic construct
  source 1..20: mol_type = other RNA
ctttgttttctgttgcagat

SEQ ID NO: 3439 - RNA, 20 nt, synthetic construct
  source 1..20: mol_type = other RNA
gaaacagctgtgaggagaaa

SEQ ID NO: 3440 - RNA, 20 nt, synthetic construct
  source 1..20: mol_type = other RNA
gaaccgtgcccagattctga

SEQ ID NO: 3441 - RNA, 20 nt, synthetic construct
  source 1..20: mol_type = other RNA
gaactaactgctgcaaggat

SEQ ID NO: 3442 - RNA, 20 nt, synthetic construct
  source 1..20: mol_type = other RNA
gaagtcagaatctgggcacg

SEQ ID NO: 3443 - RNA, 20 nt, synthetic construct
  source 1..20: mol_type = other RNA
gaatctgggcacggttctgg

SEQ ID NO: 3444 - RNA, 20 nt, synthetic construct
  source 1..20: mol_type = other RNA
gacatggtgcaccatcagca

SEQ ID NO: 3445 - RNA, 20 nt, synthetic construct
  source 1..20: mol_type = other RNA
gagcaaaatggtgagtgtgg

SEQ ID NO: 3446 - RNA, 20 nt, synthetic construct
  source 1..20: mol_type = other RNA
gaggaagtcagaatctgggc

SEQ ID NO: 3447 - RNA, 20 nt, synthetic construct
  source 1..20: mol_type = other RNA
gaggagaaagctataaaaaa

SEQ ID NO: 3448 - RNA, 20 nt, synthetic construct
  source 1..20: mol_type = other RNA
gaggaggaagtcagaatctg

SEQ ID NO: 3449 - RNA, 20 nt, synthetic construct
  source 1..20: mol_type = other RNA
gaggctctgctttgttttct

SEQ ID NO: 3450 - RNA, 20 nt, synthetic construct
  source 1..20: mol_type = other RNA
gagtgtggtgctgatggtgc

SEQ ID NO: 3451 - RNA, 20 nt, synthetic construct
  source 1..20: mol_type = other RNA
gatccagaaccgtgcccaga

SEQ ID NO: 3452 - RNA, 20 nt, synthetic construct
  source 1..20: mol_type = other RNA
gatccagaggaggaagtcag

SEQ ID NO: 3453 - RNA, 20 nt, synthetic construct
  source 1..20: mol_type = other RNA
gatccttgcagcagttagtt

SEQ ID NO: 3454 - RNA, 20 nt, synthetic construct
  source 1..20: mol_type = other RNA
gatctgcaacagaaaacaaa

SEQ ID NO: 3455 - RNA, 20 nt, synthetic construct
  source 1..20: mol_type = other RNA
gcaaaatggtgagtgtggtg

SEQ ID NO: 3456 - RNA, 20 nt, synthetic construct
  source 1..20: mol_type = other RNA
gcaacagaaaacaaagcaga

SEQ ID NO: 3457 - RNA, 20 nt, synthetic construct
  source 1..20: mol_type = other RNA
gcaccacactcaccattttg

SEQ ID NO: 3458 - RNA, 20 nt, synthetic construct
  source 1..20: mol_type = other RNA
gcaccatcagcaccacactc

SEQ ID NO: 3459 - RNA, 20 nt, synthetic construct
  source 1..20: mol_type = other RNA
gcacggttctggatctgcaa

SEQ ID NO: 3460 - RNA, 20 nt, synthetic construct
  source 1..20: mol_type = other RNA
gcagatccagaaccgtgccc

SEQ ID NO: 3461 - RNA, 20 nt, synthetic construct
  source 1..20: mol_type = other RNA
gcagcagttagttcggggtt

SEQ ID NO: 3462 - RNA, 20 nt, synthetic construct
  source 1..20: mol_type = other RNA
gcagttagttcggggttgtt

SEQ ID NO: 3463 - RNA, 20 nt, synthetic construct
  source 1..20: mol_type = other RNA
gcccagattctgacttcctc

SEQ ID NO: 3464 - RNA, 20 nt, synthetic construct
  source 1..20: mol_type = other RNA
gctcaaagaaacagctgtga

SEQ ID NO: 3465 - RNA, 20 nt, synthetic construct
  source 1..20: mol_type = other RNA
gctctgctttgttttctgtt

SEQ ID NO: 3466 - RNA, 20 nt, synthetic construct
  source 1..20: mol_type = other RNA
gctgtgaggagaaagctata

SEQ ID NO: 3467 - RNA, 20 nt, synthetic construct
  source 1..20: mol_type = other RNA
gctgtttctttgagcaaaat

SEQ ID NO: 3468 - RNA, 20 nt, synthetic construct
  source 1..20: mol_type = other RNA
gctttctcctcacagctgtt

SEQ ID NO: 3469 - RNA, 20 nt, synthetic construct
  source 1..20: mol_type = other RNA
gctttgttttctgttgcaga

SEQ ID NO: 3470 - RNA, 20 nt, synthetic construct
  source 1..20: mol_type = other RNA
ggaagtcagaatctgggcac

SEQ ID NO: 3471 - RNA, 20 nt, synthetic construct
  source 1..20: mol_type = other RNA
ggaggaagtcagaatctggg

SEQ ID NO: 3472 - RNA, 20 nt, synthetic construct
  source 1..20: mol_type = other RNA
ggaggctctgctttgttttc

SEQ ID NO: 3473 - RNA, 20 nt, synthetic construct
  source 1..20: mol_type = other RNA
ggatccagaggaggaagtca

SEQ ID NO: 3474 - RNA, 20 nt, synthetic construct
  source 1..20: mol_type = other RNA
ggatccttgcagcagttagt

SEQ ID NO: 3475 - RNA, 20 nt, synthetic construct
  source 1..20: mol_type = other RNA
ggatctgcaacagaaaacaa

SEQ ID NO: 3476 - RNA, 20 nt, synthetic construct
  source 1..20: mol_type = other RNA
ggcacggttctggatctgca

SEQ ID NO: 3477 - RNA, 20 nt, synthetic construct
  source 1..20: mol_type = other RNA
ggctctgctttgttttctgt

SEQ ID NO: 3478 - RNA, 20 nt, synthetic construct
  source 1..20: mol_type = other RNA
gggaggctctgctttgtttt

SEQ ID NO: 3479 - RNA, 20 nt, synthetic construct
  source 1..20: mol_type = other RNA
gggcacggttctggatctgc

SEQ ID NO: 3480 - RNA, 20 nt, synthetic construct
  source 1..20: mol_type = other RNA
ggtgagtgtggtgctgatgg

SEQ ID NO: 3481 - RNA, 20 nt, synthetic construct
  source 1..20: mol_type = other RNA
ggtgcaccatcagcaccaca

SEQ ID NO: 3482 - RNA, 20 nt, synthetic construct
  source 1..20: mol_type = other RNA
ggttctggatctgcaacaga

SEQ ID NO: 3483 - RNA, 20 nt, synthetic construct
  source 1..20: mol_type = other RNA
gtcagaatctgggcacggtt

SEQ ID NO: 3484 - RNA, 20 nt, synthetic construct
  source 1..20: mol_type = other RNA
gtgaggagaaagctataaaa

SEQ ID NO: 3485 - RNA, 20 nt, synthetic construct
  source 1..20: mol_type = other RNA
gtgagtgtggtgctgatggt

SEQ ID NO: 3486 - RNA, 20 nt, synthetic construct
  source 1..20: mol_type = other RNA
gtgcaccatcagcaccacac

SEQ ID NO: 3487 - RNA, 20 nt, synthetic construct
  source 1..20: mol_type = other RNA
gtgcccagattctgacttcc

SEQ ID NO: 3488 - RNA, 20 nt, synthetic construct
  source 1..20: mol_type = other RNA
gtgtggtgctgatggtgcac

SEQ ID NO: 3489 - RNA, 20 nt, synthetic construct
  source 1..20: mol_type = other RNA
gttagttcggggttgttttt

SEQ ID NO: 3490 - RNA, 20 nt, synthetic construct
  source 1..20: mol_type = other RNA
gttctggatctgcaacagaa

SEQ ID NO: 3491 - RNA, 20 nt, synthetic construct
  source 1..20: mol_type = other RNA
gttgcagatccagaaccgtg

SEQ ID NO: 3492 - RNA, 20 nt, synthetic construct
  source 1..20: mol_type = other RNA
gtttctttgagcaaaatggt

SEQ ID NO: 3493 - RNA, 20 nt, synthetic construct
  source 1..20: mol_type = other RNA
gttttctgttgcagatccag

SEQ ID NO: 3494 - RNA, 20 nt, synthetic construct
  source 1..20: mol_type = other RNA
tagctttctcctcacagctg

SEQ ID NO: 3495 - RNA, 20 nt, synthetic construct
  source 1..20: mol_type = other RNA
tatagctttctcctcacagc

SEQ ID NO: 3496 - RNA, 20 nt, synthetic construct
  source 1..20: mol_type = other RNA
tcaaagaaacagctgtgagg

SEQ ID NO: 3497 - RNA, 20 nt, synthetic construct
  source 1..20: mol_type = other RNA
tcagaatctgggcacggttc

SEQ ID NO: 3498 - RNA, 20 nt, synthetic construct
  source 1..20: mol_type = other RNA
tcagcaccacactcaccatt

SEQ ID NO: 3499 - RNA, 20 nt, synthetic construct
  source 1..20: mol_type = other RNA
tccagaaccgtgcccagatt

SEQ ID NO: 3500 - RNA, 20 nt, synthetic construct
  source 1..20: mol_type = other RNA
tccagaggaggaagtcagaa

SEQ ID NO: 3501 - RNA, 20 nt, synthetic construct
  source 1..20: mol_type = other RNA
tcctctggatccttgcagca

SEQ ID NO: 3502 - RNA, 20 nt, synthetic construct
  source 1..20: mol_type = other RNA
tccttgcagcagttagttcg

SEQ ID NO: 3503 - RNA, 20 nt, synthetic construct
  source 1..20: mol_type = other RNA
tctcctcacagctgtttctt

SEQ ID NO: 3504 - RNA, 20 nt, synthetic construct
  source 1..20: mol_type = other RNA
tctgcaacagaaaacaaagc

SEQ ID NO: 3505 - RNA, 20 nt, synthetic construct
  source 1..20: mol_type = other RNA
tctgctttgttttctgttgc

SEQ ID NO: 3506 - RNA, 20 nt, synthetic construct
  source 1..20: mol_type = other RNA
tctggatccttgcagcagtt

SEQ ID NO: 3507 - RNA, 20 nt, synthetic construct
  source 1..20: mol_type = other RNA
tctggatctgcaacagaaaa

SEQ ID NO: 3508 - RNA, 20 nt, synthetic construct
  source 1..20: mol_type = other RNA
tctgggcacggttctggatc

SEQ ID NO: 3509 - RNA, 20 nt, synthetic construct
  source 1..20: mol_type = other RNA
tctgttgcagatccagaacc

SEQ ID NO: 3510 - RNA, 20 nt, synthetic construct
  source 1..20: mol_type = other RNA
tctttgagcaaaatggtgag

SEQ ID NO: 3511 - RNA, 20 nt, synthetic construct
  source 1..20: mol_type = other RNA
tgagcaaaatggtgagtgtg

SEQ ID NO: 3512 - RNA, 20 nt, synthetic construct
  source 1..20: mol_type = other RNA
tgaggagaaagctataaaaa

SEQ ID NO: 3513 - RNA, 20 nt, synthetic construct
  source 1..20: mol_type = other RNA
tgagtgtggtgctgatggtg

SEQ ID NO: 3514 - RNA, 20 nt, synthetic construct
  source 1..20: mol_type = other RNA
tgcaacagaaaacaaagcag

SEQ ID NO: 3515 - RNA, 20 nt, synthetic construct
  source 1..20: mol_type = other RNA
tgcaccatcagcaccacact

SEQ ID NO: 3516 - RNA, 20 nt, synthetic construct
  source 1..20: mol_type = other RNA
tgcagatccagaaccgtgcc

SEQ ID NO: 3517 - RNA, 20 nt, synthetic construct
  source 1..20: mol_type = other RNA
tgcagcagttagttcggggt

SEQ ID NO: 3518 - RNA, 20 nt, synthetic construct
  source 1..20: mol_type = other RNA
tgcccagattctgacttcct

SEQ ID NO: 3519 - RNA, 20 nt, synthetic construct
  source 1..20: mol_type = other RNA
tgctcaaagaaacagctgtg

SEQ ID NO: 3520 - RNA, 20 nt, synthetic construct
  source 1..20: mol_type = other RNA
tgctgatggtgcaccatgtc

SEQ ID NO: 3521 - RNA, 20 nt, synthetic construct
  source 1..20: mol_type = other RNA
tgctttgttttctgttgcag

SEQ ID NO: 3522 - RNA, 20 nt, synthetic construct
  source 1..20: mol_type = other RNA
tggatccttgcagcagttag

SEQ ID NO: 3523 - RNA, 20 nt, synthetic construct
  source 1..20: mol_type = other RNA
tggatctgcaacagaaaaca

SEQ ID NO: 3524 - RNA, 20 nt, synthetic construct
  source 1..20: mol_type = other RNA
tgggcacggttctggatctg

SEQ ID NO: 3525 - RNA, 20 nt, synthetic construct
  source 1..20: mol_type = other RNA
tggtgagtgtggtgctgatg

SEQ ID NO: 3526 - RNA, 20 nt, synthetic construct
  source 1..20: mol_type = other RNA
tggtgcaccatcagcaccac

SEQ ID NO: 3527 - RNA, 20 nt, synthetic construct
  source 1..20: mol_type = other RNA
tgtgaggagaaagctataaa

SEQ ID NO: 3528 - RNA, 20 nt, synthetic construct
  source 1..20: mol_type = other RNA
tgttgcagatccagaaccgt

SEQ ID NO: 3529 - RNA, 20 nt, synthetic construct
  source 1..20: mol_type = other RNA
tgtttctttgagcaaaatgg

SEQ ID NO: 3530 - RNA, 20 nt, synthetic construct
  source 1..20: mol_type = other RNA
tgttttctgttgcagatcca

SEQ ID NO: 3531 - RNA, 20 nt, synthetic construct
  source 1..20: mol_type = other RNA
ttagttcggggttgtttttt

SEQ ID NO: 3532 - RNA, 20 nt, synthetic construct
  source 1..20: mol_type = other RNA
ttatagctttctcctcacag

SEQ ID NO: 3533 - RNA, 20 nt, synthetic construct
  source 1..20: mol_type = other RNA
ttctcctcacagctgtttct

SEQ ID NO: 3534 - RNA, 20 nt, synthetic construct
  source 1..20: mol_type = other RNA
ttctggatctgcaacagaaa

SEQ ID NO: 3535 - RNA, 20 nt, synthetic construct
  source 1..20: mol_type = other RNA
ttctgttgcagatccagaac

SEQ ID NO: 3536 - RNA, 20 nt, synthetic construct
  source 1..20: mol_type = other RNA
ttctttgagcaaaatggtga

SEQ ID NO: 3537 - RNA, 20 nt, synthetic construct
  source 1..20: mol_type = other RNA
ttgagcaaaatggtgagtgt

SEQ ID NO: 3538 - RNA, 20 nt, synthetic construct
  source 1..20: mol_type = other RNA
ttgcagatccagaaccgtgc

SEQ ID NO: 3539 - RNA, 20 nt, synthetic construct
  source 1..20: mol_type = other RNA
ttgcagcagttagttcgggg

SEQ ID NO: 3540 - RNA, 20 nt, synthetic construct
  source 1..20: mol_type = other RNA
ttgctcaaagaaacagctgt

SEQ ID NO: 3541 - RNA, 20 nt, synthetic construct
  source 1..20: mol_type = other RNA
ttgttttctgttgcagatcc

SEQ ID NO: 3542 - RNA, 20 nt, synthetic construct
  source 1..20: mol_type = other RNA
tttatagctttctcctcaca

SEQ ID NO: 3543 - RNA, 20 nt, synthetic construct
  source 1..20: mol_type = other RNA
tttctcctcacagctgtttc

SEQ ID NO: 3544 - RNA, 20 nt, synthetic construct
  source 1..20: mol_type = other RNA
tttctgttgcagatccagaa

SEQ ID NO: 3545 - RNA, 20 nt, synthetic construct
  source 1..20: mol_type = other RNA
tttctttgagcaaaatggtg

SEQ ID NO: 3546 - RNA, 20 nt, synthetic construct
  source 1..20: mol_type = other RNA
tttgagcaaaatggtgagtg

SEQ ID NO: 3547 - RNA, 20 nt, synthetic construct
  source 1..20: mol_type = other RNA
tttgctcaaagaaacagctg

SEQ ID NO: 3548 - RNA, 20 nt, synthetic construct
  source 1..20: mol_type = other RNA
tttgttttctgttgcagatc

SEQ ID NO: 3549 - RNA, 20 nt, synthetic construct
  source 1..20: mol_type = other RNA
ttttatagctttctcctcac

SEQ ID NO: 3550 - RNA, 20 nt, synthetic construct
  source 1..20: mol_type = other RNA
ttttctgttgcagatccaga

SEQ ID NO: 3551 - RNA, 20 nt, synthetic construct
  source 1..20: mol_type = other RNA
tttttatagctttctcctca

SEQ ID NO: 3552 - RNA, 20 nt, synthetic construct
  source 1..20: mol_type = other RNA
ttttttatagctttctcctc

SEQ ID NO: 3553 - RNA, 21 nt, synthetic construct
  source 1..21: mol_type = other RNA
aaaaaacaaccccgaactaac

SEQ ID NO: 3554 - RNA, 21 nt, synthetic construct
  source 1..21: mol_type = other RNA
aaaaacaaccccgaactaact

SEQ ID NO: 3555 - RNA, 21 nt, synthetic construct
  source 1..21: mol_type = other RNA
aaaacaaccccgaactaactg

SEQ ID NO: 3556 - RNA, 21 nt, synthetic construct
  source 1..21: mol_type = other RNA
aaaatggtgagtgtggtgctg

SEQ ID NO: 3557 - RNA, 21 nt, synthetic construct
  source 1..21: mol_type = other RNA
aaacaaccccgaactaactgc

SEQ ID NO: 3558 - RNA, 21 nt, synthetic construct
  source 1..21: mol_type = other RNA
aaacagctgtgaggagaaagc

SEQ ID NO: 3559 - RNA, 21 nt, synthetic construct
  source 1..21: mol_type = other RNA
aaagaaacagctgtgaggaga

SEQ ID NO: 3560 - RNA, 21 nt, synthetic construct
  source 1..21: mol_type = other RNA
aaatggtgagtgtggtgctga

SEQ ID NO: 3561 - RNA, 21 nt, synthetic construct
  source 1..21: mol_type = other RNA
aacaaccccgaactaactgct

SEQ ID NO: 3562 - RNA, 21 nt, synthetic construct
  source 1..21: mol_type = other RNA
aacagctgtgaggagaaagct

SEQ ID NO: 3563 - RNA, 21 nt, synthetic construct
  source 1..21: mol_type = other RNA
aaccccgaactaactgctgca

SEQ ID NO: 3564 - RNA, 21 nt, synthetic construct
  source 1..21: mol_type = other RNA
aaccgtgcccagattctgact

SEQ ID NO: 3565 - RNA, 21 nt, synthetic construct
  source 1..21: mol_type = other RNA
aagaaacagctgtgaggagaa

SEQ ID NO: 3566 - RNA, 21 nt, synthetic construct
  source 1..21: mol_type = other RNA
aagtcagaatctgggcacggt

SEQ ID NO: 3567 - RNA, 21 nt, synthetic construct
  source 1..21: mol_type = other RNA
aatctgggcacggttctggat

SEQ ID NO: 3568 - RNA, 21 nt, synthetic construct
  source 1..21: mol_type = other RNA
aatggtgagtgtggtgctgat

SEQ ID NO: 3569 - RNA, 21 nt, synthetic construct
  source 1..21: mol_type = other RNA
acaaccccgaactaactgctg

SEQ ID NO: 3570 - RNA, 21 nt, synthetic construct
  source 1..21: mol_type = other RNA
acactcaccattttgctcaaa

SEQ ID NO: 3571 - RNA, 21 nt, synthetic construct
  source 1..21: mol_type = other RNA
acagctgtgaggagaaagcta

SEQ ID NO: 3572 - RNA, 21 nt, synthetic construct
  source 1..21: mol_type = other RNA
acagctgtttctttgagcaaa

SEQ ID NO: 3573 - RNA, 21 nt, synthetic construct
  source 1..21: mol_type = other RNA
acatggtgcaccatcagcacc

SEQ ID NO: 3574 - RNA, 21 nt, synthetic construct
  source 1..21: mol_type = other RNA
accacactcaccattttgctc

SEQ ID NO: 3575 - RNA, 21 nt, synthetic construct
  source 1..21: mol_type = other RNA
accatcagcaccacactcacc

SEQ ID NO: 3576 - RNA, 21 nt, synthetic construct
  source 1..21: mol_type = other RNA
accccgaactaactgctgcaa

SEQ ID NO: 3577 - RNA, 21 nt, synthetic construct
  source 1..21: mol_type = other RNA
accgtgcccagattctgactt

SEQ ID NO: 3578 - RNA, 21 nt, synthetic construct
  source 1..21: mol_type = other RNA
acggttctggatctgcaacag

SEQ ID NO: 3579 - RNA, 21 nt, synthetic construct
  source 1..21: mol_type = other RNA
actcaccattttgctcaaaga

SEQ ID NO: 3580 - RNA, 21 nt, synthetic construct
  source 1..21: mol_type = other RNA
agaaacagctgtgaggagaaa

SEQ ID NO: 3581 - RNA, 21 nt, synthetic construct
  source 1..21: mol_type = other RNA
agaaccgtgcccagattctga

SEQ ID NO: 3582 - RNA, 21 nt, synthetic construct
  source 1..21: mol_type = other RNA
agaatctgggcacggttctgg

SEQ ID NO: 3583 - RNA, 21 nt, synthetic construct
  source 1..21: mol_type = other RNA
agacatggtgcaccatcagca

SEQ ID NO: 3584 - RNA, 21 nt, synthetic construct
  source 1..21: mol_type = other RNA
agaggaggaagtcagaatctg

SEQ ID NO: 3585 - RNA, 21 nt, synthetic construct
  source 1..21: mol_type = other RNA
agatccagaaccgtgcccaga

SEQ ID NO: 3586 - RNA, 21 nt, synthetic construct
  source 1..21: mol_type = other RNA
agcaaaatggtgagtgtggtg

SEQ ID NO: 3587 - RNA, 21 nt, synthetic construct
  source 1..21: mol_type = other RNA
agcaccacactcaccattttg

SEQ ID NO: 3588 - RNA, 21 nt, synthetic construct
  source 1..21: mol_type = other RNA
agcagttagttcggggttgtt

SEQ ID NO: 3589 - RNA, 21 nt, synthetic construct
  source 1..21: mol_type = other RNA
agctgtgaggagaaagctata

SEQ ID NO: 3590 - RNA, 21 nt, synthetic construct
  source 1..21: mol_type = other RNA
agctgtttctttgagcaaaat

SEQ ID NO: 3591 - RNA, 21 nt, synthetic construct
  source 1..21: mol_type = other RNA
agctttctcctcacagctgtt

SEQ ID NO: 3592 - RNA, 21 nt, synthetic construct
  source 1..21: mol_type = other RNA
aggaagtcagaatctgggcac

SEQ ID NO: 3593 - RNA, 21 nt, synthetic construct
  source 1..21: mol_type = other RNA
aggaggaagtcagaatctggg

SEQ ID NO: 3594 - RNA, 21 nt, synthetic construct
  source 1..21: mol_type = other RNA
aggatccagaggaggaagtca

SEQ ID NO: 3595 - RNA, 21 nt, synthetic construct
  source 1..21: mol_type = other RNA
aggctctgctttgttttctgt

SEQ ID NO: 3596 - RNA, 21 nt, synthetic construct
  source 1..21: mol_type = other RNA
agggaggctctgctttgtttt

SEQ ID NO: 3597 - RNA, 21 nt, synthetic construct
  source 1..21: mol_type = other RNA
agtcagaatctgggcacggtt

SEQ ID NO: 3598 - RNA, 21 nt, synthetic construct
  source 1..21: mol_type = other RNA
agtgtggtgctgatggtgcac

SEQ ID NO: 3599 - RNA, 21 nt, synthetic construct
  source 1..21: mol_type = other RNA
agttagttcggggttgttttt

SEQ ID NO: 3600 - RNA, 21 nt, synthetic construct
  source 1..21: mol_type = other RNA
atagctttctcctcacagctg

SEQ ID NO: 3601 - RNA, 21 nt, synthetic construct
  source 1..21: mol_type = other RNA
atcagcaccacactcaccatt

SEQ ID NO: 3602 - RNA, 21 nt, synthetic construct
  source 1..21: mol_type = other RNA
atccagaaccgtgcccagatt

SEQ ID NO: 3603 - RNA, 21 nt, synthetic construct
  source 1..21: mol_type = other RNA
atccagaggaggaagtcagaa

SEQ ID NO: 3604 - RNA, 21 nt, synthetic construct
  source 1..21: mol_type = other RNA
atccttgcagcagttagttcg

SEQ ID NO: 3605 - RNA, 21 nt, synthetic construct
  source 1..21: mol_type = other RNA
atctgcaacagaaaacaaagc

SEQ ID NO: 3606 - RNA, 21 nt, synthetic construct
  source 1..21: mol_type = other RNA
atctgggcacggttctggatc

SEQ ID NO: 3607 - RNA, 21 nt, synthetic construct
  source 1..21: mol_type = other RNA
atggtgagtgtggtgctgatg

SEQ ID NO: 3608 - RNA, 21 nt, synthetic construct
  source 1..21: mol_type = other RNA
atggtgcaccatcagcaccac

SEQ ID NO: 3609 - RNA, 21 nt, synthetic construct
  source 1..21: mol_type = other RNA
caaaatggtgagtgtggtgct

SEQ ID NO: 3610 - RNA, 21 nt, synthetic construct
  source 1..21: mol_type = other RNA
caaagaaacagctgtgaggag

SEQ ID NO: 3611 - RNA, 21 nt, synthetic construct
  source 1..21: mol_type = other RNA
caacagaaaacaaagcagagc

SEQ ID NO: 3612 - RNA, 21 nt, synthetic construct
  source 1..21: mol_type = other RNA
caaccccgaactaactgctgc

SEQ ID NO: 3613 - RNA, 21 nt, synthetic construct
  source 1..21: mol_type = other RNA
cacactcaccattttgctcaa

SEQ ID NO: 3614 - RNA, 21 nt, synthetic construct
  source 1..21: mol_type = other RNA
caccacactcaccattttgct

SEQ ID NO: 3615 - RNA, 21 nt, synthetic construct
  source 1..21: mol_type = other RNA
caccatcagcaccacactcac

SEQ ID NO: 3616 - RNA, 21 nt, synthetic construct
  source 1..21: mol_type = other RNA
cacggttctggatctgcaaca

SEQ ID NO: 3617 - RNA, 21 nt, synthetic construct
  source 1..21: mol_type = other RNA
cactcaccattttgctcaaag

SEQ ID NO: 3618 - RNA, 21 nt, synthetic construct
  source 1..21: mol_type = other RNA
cagaaccgtgcccagattctg

SEQ ID NO: 3619 - RNA, 21 nt, synthetic construct
  source 1..21: mol_type = other RNA
cagaatctgggcacggttctg

SEQ ID NO: 3620 - RNA, 21 nt, synthetic construct
  source 1..21: mol_type = other RNA
cagacatggtgcaccatcagc

SEQ ID NO: 3621 - RNA, 21 nt, synthetic construct
  source 1..21: mol_type = other RNA
cagaggaggaagtcagaatct

SEQ ID NO: 3622 - RNA, 21 nt, synthetic construct
  source 1..21: mol_type = other RNA
cagatccagaaccgtgcccag

SEQ ID NO: 3623 - RNA, 21 nt, synthetic construct
  source 1..21: mol_type = other RNA
cagcaccacactcaccatttt

SEQ ID NO: 3624 - RNA, 21 nt, synthetic construct
  source 1..21: mol_type = other RNA
cagcagttagttcggggttgt

SEQ ID NO: 3625 - RNA, 21 nt, synthetic construct
  source 1..21: mol_type = other RNA
cagctgtgaggagaaagctat

SEQ ID NO: 3626 - RNA, 21 nt, synthetic construct
  source 1..21: mol_type = other RNA
cagctgtttctttgagcaaaa

SEQ ID NO: 3627 - RNA, 21 nt, synthetic construct
  source 1..21: mol_type = other RNA
cagggaggctctgctttgttt

SEQ ID NO: 3628 - RNA, 21 nt, synthetic construct
  source 1..21: mol_type = other RNA
cagttagttcggggttgtttt

SEQ ID NO: 3629 - RNA, 21 nt, synthetic construct
  source 1..21: mol_type = other RNA
catcagcaccacactcaccat

SEQ ID NO: 3630 - RNA, 21 nt, synthetic construct
  source 1..21: mol_type = other RNA
catggtgcaccatcagcacca

SEQ ID NO: 3631 - RNA, 21 nt, synthetic construct
  source 1..21: mol_type = other RNA
ccacactcaccattttgctca

SEQ ID NO: 3632 - RNA, 21 nt, synthetic construct
  source 1..21: mol_type = other RNA
ccagaaccgtgcccagattct

SEQ ID NO: 3633 - RNA, 21 nt, synthetic construct
  source 1..21: mol_type = other RNA
ccagaggaggaagtcagaatc

SEQ ID NO: 3634 - RNA, 21 nt, synthetic construct
  source 1..21: mol_type = other RNA
ccagattctgacttcctcctc

SEQ ID NO: 3635 - RNA, 21 nt, synthetic construct
  source 1..21: mol_type = other RNA
ccatcagcaccacactcacca

SEQ ID NO: 3636 - RNA, 21 nt, synthetic construct
  source 1..21: mol_type = other RNA
cccagattctgacttcctcct

SEQ ID NO: 3637 - RNA, 21 nt, synthetic construct
  source 1..21: mol_type = other RNA
ccccatcagacatggtgcacc

SEQ ID NO: 3638 - RNA, 21 nt, synthetic construct
  source 1..21: mol_type = other RNA
ccccgaactaactgctgcaag

SEQ ID NO: 3639 - RNA, 21 nt, synthetic construct
  source 1..21: mol_type = other RNA
cccgaactaactgctgcaagg

SEQ ID NO: 3640 - RNA, 21 nt, synthetic construct
  source 1..21: mol_type = other RNA
ccgaactaactgctgcaagga

SEQ ID NO: 3641 - RNA, 21 nt, synthetic construct
  source 1..21: mol_type = other RNA
ccgtgcccagattctgacttc

SEQ ID NO: 3642 - RNA, 21 nt, synthetic construct
  source 1..21: mol_type = other RNA
cctctggatccttgcagcagt

SEQ ID NO: 3643 - RNA, 21 nt, synthetic construct
  source 1..21: mol_type = other RNA
ccttgcagcagttagttcggg

SEQ ID NO: 3644 - RNA, 21 nt, synthetic construct
  source 1..21: mol_type = other RNA
cgaactaactgctgcaaggat

SEQ ID NO: 3645 - RNA, 21 nt, synthetic construct
  source 1..21: mol_type = other RNA
cggttctggatctgcaacaga

SEQ ID NO: 3646 - RNA, 21 nt, synthetic construct
  source 1..21: mol_type = other RNA
cgtgcccagattctgacttcc

SEQ ID NO: 3647 - RNA, 21 nt, synthetic construct
  source 1..21: mol_type = other RNA
ctcaaagaaacagctgtgagg

SEQ ID NO: 3648 - RNA, 21 nt, synthetic construct
  source 1..21: mol_type = other RNA
ctcaccattttgctcaaagaa

SEQ ID NO: 3649 - RNA, 21 nt, synthetic construct
  source 1..21: mol_type = other RNA
ctcctctggatccttgcagca

SEQ ID NO: 3650 - RNA, 21 nt, synthetic construct
  source 1..21: mol_type = other RNA
ctctgctttgttttctgttgc

SEQ ID NO: 3651 - RNA, 21 nt, synthetic construct
  source 1..21: mol_type = other RNA
ctctggatccttgcagcagtt

SEQ ID NO: 3652 - RNA, 21 nt, synthetic construct
  source 1..21: mol_type = other RNA
ctgcaacagaaaacaaagcag

SEQ ID NO: 3653 - RNA, 21 nt, synthetic construct
  source 1..21: mol_type = other RNA
ctgctttgttttctgttgcag

SEQ ID NO: 3654 - RNA, 21 nt, synthetic construct
  source 1..21: mol_type = other RNA
ctggatccttgcagcagttag

SEQ ID NO: 3655 - RNA, 21 nt, synthetic construct
  source 1..21: mol_type = other RNA
ctggatctgcaacagaaaaca

SEQ ID NO: 3656 - RNA, 21 nt, synthetic construct
  source 1..21: mol_type = other RNA
ctgggcacggttctggatctg

SEQ ID NO: 3657 - RNA, 21 nt, synthetic construct
  source 1..21: mol_type = other RNA
ctgtgaggagaaagctataaa

SEQ ID NO: 3658 - RNA, 21 nt, synthetic construct
  source 1..21: mol_type = other RNA
ctgttgcagatccagaaccgt

SEQ ID NO: 3659 - RNA, 21 nt, synthetic construct
  source 1..21: mol_type = other RNA
ctgtttctttgagcaaaatgg

SEQ ID NO: 3660 - RNA, 21 nt, synthetic construct
  source 1..21: mol_type = other RNA
cttgcagcagttagttcgggg

SEQ ID NO: 3661 - RNA, 21 nt, synthetic construct
  source 1..21: mol_type = other RNA
ctttctcctcacagctgtttc

SEQ ID NO: 3662 - RNA, 21 nt, synthetic construct
  source 1..21: mol_type = other RNA
ctttgagcaaaatggtgagtg

SEQ ID NO: 3663 - RNA, 21 nt, synthetic construct
  source 1..21: mol_type = other RNA
ctttgttttctgttgcagatc

SEQ ID NO: 3664 - RNA, 21 nt, synthetic construct
  source 1..21: mol_type = other RNA
gaaacagctgtgaggagaaag

SEQ ID NO: 3665 - RNA, 21 nt, synthetic construct
  source 1..21: mol_type = other RNA
gaaccgtgcccagattctgac

SEQ ID NO: 3666 - RNA, 21 nt, synthetic construct
  source 1..21: mol_type = other RNA
gaactaactgctgcaaggatc

SEQ ID NO: 3667 - RNA, 21 nt, synthetic construct
  source 1..21: mol_type = other RNA
gaagtcagaatctgggcacgg

SEQ ID NO: 3668 - RNA, 21 nt, synthetic construct
  source 1..21: mol_type = other RNA
gaatctgggcacggttctgga

SEQ ID NO: 3669 - RNA, 21 nt, synthetic construct
  source 1..21: mol_type = other RNA
gacatggtgcaccatcagcac

SEQ ID NO: 3670 - RNA, 21 nt, synthetic construct
  source 1..21: mol_type = other RNA
gagcaaaatggtgagtgtggt

SEQ ID NO: 3671 - RNA, 21 nt, synthetic construct
  source 1..21: mol_type = other RNA
gaggaagtcagaatctgggca

SEQ ID NO: 3672 - RNA, 21 nt, synthetic construct
  source 1..21: mol_type = other RNA
gaggaggaagtcagaatctgg

SEQ ID NO: 3673 - RNA, 21 nt, synthetic construct
  source 1..21: mol_type = other RNA
gaggctctgctttgttttctg

SEQ ID NO: 3674 - RNA, 21 nt, synthetic construct
  source 1..21: mol_type = other RNA
gagtgtggtgctgatggtgca

SEQ ID NO: 3675 - RNA, 21 nt, synthetic construct
  source 1..21: mol_type = other RNA
gatccagaaccgtgcccagat

SEQ ID NO: 3676 - RNA, 21 nt, synthetic construct
  source 1..21: mol_type = other RNA
gatccagaggaggaagtcaga

SEQ ID NO: 3677 - RNA, 21 nt, synthetic construct
  source 1..21: mol_type = other RNA
gatccttgcagcagttagttc

SEQ ID NO: 3678 - RNA, 21 nt, synthetic construct
  source 1..21: mol_type = other RNA
gatctgcaacagaaaacaaag

SEQ ID NO: 3679 - RNA, 21 nt, synthetic construct
  source 1..21: mol_type = other RNA
gcaaaatggtgagtgtggtgc

SEQ ID NO: 3680 - RNA, 21 nt, synthetic construct
  source 1..21: mol_type = other RNA
gcaacagaaaacaaagcagag

SEQ ID NO: 3681 - RNA, 21 nt, synthetic construct
  source 1..21: mol_type = other RNA
gcaccacactcaccattttgc

SEQ ID NO: 3682 - RNA, 21 nt, synthetic construct
  source 1..21: mol_type = other RNA
gcaccatcagcaccacactca

SEQ ID NO: 3683 - RNA, 21 nt, synthetic construct
  source 1..21: mol_type = other RNA
gcacggttctggatctgcaac

SEQ ID NO: 3684 - RNA, 21 nt, synthetic construct
  source 1..21: mol_type = other RNA
gcagatccagaaccgtgccca

SEQ ID NO: 3685 - RNA, 21 nt, synthetic construct
  source 1..21: mol_type = other RNA
gcagcagttagttcggggttg

SEQ ID NO: 3686 - RNA, 21 nt, synthetic construct
  source 1..21: mol_type = other RNA
gcagttagttcggggttgttt

SEQ ID NO: 3687 - RNA, 21 nt, synthetic construct
  source 1..21: mol_type = other RNA
gcccagattctgacttcctcc

SEQ ID NO: 3688 - RNA, 21 nt, synthetic construct
  source 1..21: mol_type = other RNA
gctcaaagaaacagctgtgag

SEQ ID NO: 3689 - RNA, 21 nt, synthetic construct
  source 1..21: mol_type = other RNA
gctctgctttgttttctgttg

SEQ ID NO: 3690 - RNA, 21 nt, synthetic construct
  source 1..21: mol_type = other RNA
gctgtgaggagaaagctataa

SEQ ID NO: 3691 - RNA, 21 nt, synthetic construct
  source 1..21: mol_type = other RNA
gctgtttctttgagcaaaatg

SEQ ID NO: 3692 - RNA, 21 nt, synthetic construct
  source 1..21: mol_type = other RNA
gctttctcctcacagctgttt

SEQ ID NO: 3693 - RNA, 21 nt, synthetic construct
  source 1..21: mol_type = other RNA
gctttgttttctgttgcagat

SEQ ID NO: 3694 - RNA, 21 nt, synthetic construct
  source 1..21: mol_type = other RNA
ggaagtcagaatctgggcacg

SEQ ID NO: 3695 - RNA, 21 nt, synthetic construct
  source 1..21: mol_type = other RNA
ggaggaagtcagaatctgggc

SEQ ID NO: 3696 - RNA, 21 nt, synthetic construct
  source 1..21: mol_type = other RNA
ggaggctctgctttgttttct

SEQ ID NO: 3697 - RNA, 21 nt, synthetic construct
  source 1..21: mol_type = other RNA
ggatccagaggaggaagtcag

SEQ ID NO: 3698 - RNA, 21 nt, synthetic construct
  source 1..21: mol_type = other RNA
ggatccttgcagcagttagtt

SEQ ID NO: 3699 - RNA, 21 nt, synthetic construct
  source 1..21: mol_type = other RNA
ggatctgcaacagaaaacaaa

SEQ ID NO: 3700 - RNA, 21 nt, synthetic construct
  source 1..21: mol_type = other RNA
ggcacggttctggatctgcaa

SEQ ID NO: 3701 - RNA, 21 nt, synthetic construct
  source 1..21: mol_type = other RNA
ggctctgctttgttttctgtt

SEQ ID NO: 3702 - RNA, 21 nt, synthetic construct
  source 1..21: mol_type = other RNA
gggaggctctgctttgttttc

SEQ ID NO: 3703 - RNA, 21 nt, synthetic construct
  source 1..21: mol_type = other RNA
gggcacggttctggatctgca

SEQ ID NO: 3704 - RNA, 21 nt, synthetic construct
  source 1..21: mol_type = other RNA
ggtgagtgtggtgctgatggt

SEQ ID NO: 3705 - RNA, 21 nt, synthetic construct
  source 1..21: mol_type = other RNA
ggtgcaccatcagcaccacac

SEQ ID NO: 3706 - RNA, 21 nt, synthetic construct
  source 1..21: mol_type = other RNA
ggttctggatctgcaacagaa

SEQ ID NO: 3707 - RNA, 21 nt, synthetic construct
  source 1..21: mol_type = other RNA
gtcagaatctgggcacggttc

SEQ ID NO: 3708 - RNA, 21 nt, synthetic construct
  source 1..21: mol_type = other RNA
gtgaggagaaagctataaaaa

SEQ ID NO: 3709 - RNA, 21 nt, synthetic construct
  source 1..21: mol_type = other RNA
gtgagtgtggtgctgatggtg

SEQ ID NO: 3710 - RNA, 21 nt, synthetic construct
  source 1..21: mol_type = other RNA
gtgcaccatcagcaccacact

SEQ ID NO: 3711 - RNA, 21 nt, synthetic construct
  source 1..21: mol_type = other RNA
gtgcccagattctgacttcct

SEQ ID NO: 3712 - RNA, 21 nt, synthetic construct
  source 1..21: mol_type = other RNA
gtgctgatggtgcaccatgtc

SEQ ID NO: 3713 - RNA, 21 nt, synthetic construct
  source 1..21: mol_type = other RNA
gtgtggtgctgatggtgcacc

SEQ ID NO: 3714 - RNA, 21 nt, synthetic construct
  source 1..21: mol_type = other RNA
gttagttcggggttgtttttt

SEQ ID NO: 3715 - RNA, 21 nt, synthetic construct
  source 1..21: mol_type = other RNA
gttctggatctgcaacagaaa

SEQ ID NO: 3716 - RNA, 21 nt, synthetic construct
  source 1..21: mol_type = other RNA
gttgcagatccagaaccgtgc

SEQ ID NO: 3717 - RNA, 21 nt, synthetic construct
  source 1..21: mol_type = other RNA
gtttctttgagcaaaatggtg

SEQ ID NO: 3718 - RNA, 21 nt, synthetic construct
  source 1..21: mol_type = other RNA
gttttctgttgcagatccaga

SEQ ID NO: 3719 - RNA, 21 nt, synthetic construct
  source 1..21: mol_type = other RNA
tagctttctcctcacagctgt

SEQ ID NO: 3720 - RNA, 21 nt, synthetic construct
  source 1..21: mol_type = other RNA
tatagctttctcctcacagct

SEQ ID NO: 3721 - RNA, 21 nt, synthetic construct
  source 1..21: mol_type = other RNA
tcaaagaaacagctgtgagga

SEQ ID NO: 3722 - RNA, 21 nt, synthetic construct
  source 1..21: mol_type = other RNA
tcagaatctgggcacggttct

SEQ ID NO: 3723 - RNA, 21 nt, synthetic construct
  source 1..21: mol_type = other RNA
tcagacatggtgcaccatcag

SEQ ID NO: 3724 - RNA, 21 nt, synthetic construct
  source 1..21: mol_type = other RNA
tcagcaccacactcaccattt

SEQ ID NO: 3725 - RNA, 21 nt, synthetic construct
  source 1..21: mol_type = other RNA
tcagggaggctctgctttgtt

SEQ ID NO: 3726 - RNA, 21 nt, synthetic construct
  source 1..21: mol_type = other RNA
tccagaaccgtgcccagattc

SEQ ID NO: 3727 - RNA, 21 nt, synthetic construct
  source 1..21: mol_type = other RNA
tccagaggaggaagtcagaat

SEQ ID NO: 3728 - RNA, 21 nt, synthetic construct
  source 1..21: mol_type = other RNA
tcctctggatccttgcagcag

SEQ ID NO: 3729 - RNA, 21 nt, synthetic construct
  source 1..21: mol_type = other RNA
tccttgcagcagttagttcgg

SEQ ID NO: 3730 - RNA, 21 nt, synthetic construct
  source 1..21: mol_type = other RNA
tctcctcacagctgtttcttt

SEQ ID NO: 3731 - RNA, 21 nt, synthetic construct
  source 1..21: mol_type = other RNA
tctgcaacagaaaacaaagca

SEQ ID NO: 3732 - RNA, 21 nt, synthetic construct
  source 1..21: mol_type = other RNA
tctgctttgttttctgttgca

SEQ ID NO: 3733 - RNA, 21 nt, synthetic construct
  source 1..21: mol_type = other RNA
tctggatccttgcagcagtta

SEQ ID NO: 3734 - RNA, 21 nt, synthetic construct
  source 1..21: mol_type = other RNA
tctggatctgcaacagaaaac

SEQ ID NO: 3735 - RNA, 21 nt, synthetic construct
  source 1..21: mol_type = other RNA
tctgggcacggttctggatct

SEQ ID NO: 3736 - RNA, 21 nt, synthetic construct
  source 1..21: mol_type = other RNA
tctgttgcagatccagaaccg

SEQ ID NO: 3737 - RNA, 21 nt, synthetic construct
  source 1..21: mol_type = other RNA
tctttgagcaaaatggtgagt

SEQ ID NO: 3738 - RNA, 21 nt, synthetic construct
  source 1..21: mol_type = other RNA
tgagcaaaatggtgagtgtgg

SEQ ID NO: 3739 - RNA, 21 nt, synthetic construct
  source 1..21: mol_type = other RNA
tgaggagaaagctataaaaaa

SEQ ID NO: 3740 - RNA, 21 nt, synthetic construct
  source 1..21: mol_type = other RNA
tgagtgtggtgctgatggtgc

SEQ ID NO: 3741 - RNA, 21 nt, synthetic construct
  source 1..21: mol_type = other RNA
tgcaacagaaaacaaagcaga

SEQ ID NO: 3742 - RNA, 21 nt, synthetic construct
  source 1..21: mol_type = other RNA
tgcaccatcagcaccacactc

SEQ ID NO: 3743 - RNA, 21 nt, synthetic construct
  source 1..21: mol_type = other RNA
tgcagatccagaaccgtgccc

SEQ ID NO: 3744 - RNA, 21 nt, synthetic construct
  source 1..21: mol_type = other RNA
tgcagcagttagttcggggtt

SEQ ID NO: 3745 - RNA, 21 nt, synthetic construct
  source 1..21: mol_type = other RNA
tgcccagattctgacttcctc

SEQ ID NO: 3746 - RNA, 21 nt, synthetic construct
  source 1..21: mol_type = other RNA
tgctcaaagaaacagctgtga

SEQ ID NO: 3747 - RNA, 21 nt, synthetic construct
  source 1..21: mol_type = other RNA
tgctttgttttctgttgcaga

SEQ ID NO: 3748 - RNA, 21 nt, synthetic construct
  source 1..21: mol_type = other RNA
tggatccttgcagcagttagt

SEQ ID NO: 3749 - RNA, 21 nt, synthetic construct
  source 1..21: mol_type = other RNA
tggatctgcaacagaaaacaa

SEQ ID NO: 3750 - RNA, 21 nt, synthetic construct
  source 1..21: mol_type = other RNA
tgggcacggttctggatctgc

SEQ ID NO: 3751 - RNA, 21 nt, synthetic construct
  source 1..21: mol_type = other RNA
tggtgagtgtggtgctgatgg

SEQ ID NO: 3752 - RNA, 21 nt, synthetic construct
  source 1..21: mol_type = other RNA
tggtgcaccatcagcaccaca

SEQ ID NO: 3753 - RNA, 21 nt, synthetic construct
  source 1..21: mol_type = other RNA
tgtgaggagaaagctataaaa

SEQ ID NO: 3754 - RNA, 21 nt, synthetic construct
  source 1..21: mol_type = other RNA
tgttgcagatccagaaccgtg

SEQ ID NO: 3755 - RNA, 21 nt, synthetic construct
  source 1..21: mol_type = other RNA
tgtttctttgagcaaaatggt

SEQ ID NO: 3756 - RNA, 21 nt, synthetic construct
  source 1..21: mol_type = other RNA
tgttttctgttgcagatccag

SEQ ID NO: 3757 - RNA, 21 nt, synthetic construct
  source 1..21: mol_type = other RNA
ttatagctttctcctcacagc

SEQ ID NO: 3758 - RNA, 21 nt, synthetic construct
  source 1..21: mol_type = other RNA
ttctcctcacagctgtttctt

SEQ ID NO: 3759 - RNA, 21 nt, synthetic construct
  source 1..21: mol_type = other RNA
ttctggatctgcaacagaaaa

SEQ ID NO: 3760 - RNA, 21 nt, synthetic construct
  source 1..21: mol_type = other RNA
ttctgttgcagatccagaacc

SEQ ID NO: 3761 - RNA, 21 nt, synthetic construct
  source 1..21: mol_type = other RNA
ttctttgagcaaaatggtgag

SEQ ID NO: 3762 - RNA, 21 nt, synthetic construct
  source 1..21: mol_type = other RNA
ttgagcaaaatggtgagtgtg

SEQ ID NO: 3763 - RNA, 21 nt, synthetic construct
  source 1..21: mol_type = other RNA
ttgcagatccagaaccgtgcc

SEQ ID NO: 3764 - RNA, 21 nt, synthetic construct
  source 1..21: mol_type = other RNA
ttgcagcagttagttcggggt

SEQ ID NO: 3765 - RNA, 21 nt, synthetic construct
  source 1..21: mol_type = other RNA
ttgctcaaagaaacagctgtg

SEQ ID NO: 3766 - RNA, 21 nt, synthetic construct
  source 1..21: mol_type = other RNA
ttgttttctgttgcagatcca

SEQ ID NO: 3767 - RNA, 21 nt, synthetic construct
  source 1..21: mol_type = other RNA
tttatagctttctcctcacag

SEQ ID NO: 3768 - RNA, 21 nt, synthetic construct
  source 1..21: mol_type = other RNA
tttctcctcacagctgtttct

SEQ ID NO: 3769 - RNA, 21 nt, synthetic construct
  source 1..21: mol_type = other RNA
tttctgttgcagatccagaac

SEQ ID NO: 3770 - RNA, 21 nt, synthetic construct
  source 1..21: mol_type = other RNA
tttctttgagcaaaatggtga

SEQ ID NO: 3771 - RNA, 21 nt, synthetic construct
  source 1..21: mol_type = other RNA
tttgagcaaaatggtgagtgt

SEQ ID NO: 3772 - RNA, 21 nt, synthetic construct
  source 1..21: mol_type = other RNA
tttgctcaaagaaacagctgt

SEQ ID NO: 3773 - RNA, 21 nt, synthetic construct
  source 1..21: mol_type = other RNA
tttgttttctgttgcagatcc

SEQ ID NO: 3774 - RNA, 21 nt, synthetic construct
  source 1..21: mol_type = other RNA
ttttatagctttctcctcaca

SEQ ID NO: 3775 - RNA, 21 nt, synthetic construct
  source 1..21: mol_type = other RNA
ttttctgttgcagatccagaa

SEQ ID NO: 3776 - RNA, 21 nt, synthetic construct
  source 1..21: mol_type = other RNA
ttttgctcaaagaaacagctg

SEQ ID NO: 3777 - RNA, 21 nt, synthetic construct
  source 1..21: mol_type = other RNA
tttttatagctttctcctcac

SEQ ID NO: 3778 - RNA, 21 nt, synthetic construct
  source 1..21: mol_type = other RNA
ttttttatagctttctcctca

SEQ ID NO: 3779 - RNA, 22 nt, synthetic construct
  source 1..22: mol_type = other RNA
aaaaaacaaccccgaactaact

SEQ ID NO: 3780 - RNA, 22 nt, synthetic construct
  source 1..22: mol_type = other RNA
aaaaacaaccccgaactaactg

SEQ ID NO: 3781 - RNA, 22 nt, synthetic construct
  source 1..22: mol_type = other RNA
aaaacaaccccgaactaactgc

SEQ ID NO: 3782 - RNA, 22 nt, synthetic construct
  source 1..22: mol_type = other RNA
aaaatggtgagtgtggtgctga

SEQ ID NO: 3783 - RNA, 22 nt, synthetic construct
  source 1..22: mol_type = other RNA
aaacaaccccgaactaactgct

SEQ ID NO: 3784 - RNA, 22 nt, synthetic construct
  source 1..22: mol_type = other RNA
aaacagctgtgaggagaaagct

SEQ ID NO: 3785 - RNA, 22 nt, synthetic construct
  source 1..22: mol_type = other RNA
aaagaaacagctgtgaggagaa

SEQ ID NO: 3786 - RNA, 22 nt, synthetic construct
  source 1..22: mol_type = other RNA
aaatggtgagtgtggtgctgat

SEQ ID NO: 3787 - RNA, 22 nt, synthetic construct
  source 1..22: mol_type = other RNA
aacaaccccgaactaactgctg

SEQ ID NO: 3788 - RNA, 22 nt, synthetic construct
  source 1..22: mol_type = other RNA
aacagctgtgaggagaaagcta

SEQ ID NO: 3789 - RNA, 22 nt, synthetic construct
  source 1..22: mol_type = other RNA
aaccccgaactaactgctgcaa

SEQ ID NO: 3790 - RNA, 22 nt, synthetic construct
  source 1..22: mol_type = other RNA
aaccgtgcccagattctgactt

SEQ ID NO: 3791 - RNA, 22 nt, synthetic construct
  source 1..22: mol_type = other RNA
aagaaacagctgtgaggagaaa

SEQ ID NO: 3792 - RNA, 22 nt, synthetic construct
  source 1..22: mol_type = other RNA
aaggatccagaggaggaagtca

SEQ ID NO: 3793 - RNA, 22 nt, synthetic construct
  source 1..22: mol_type = other RNA
aagtcagaatctgggcacggtt

SEQ ID NO: 3794 - RNA, 22 nt, synthetic construct
  source 1..22: mol_type = other RNA
aatctgggcacggttctggatc

SEQ ID NO: 3795 - RNA, 22 nt, synthetic construct
  source 1..22: mol_type = other RNA
aatggtgagtgtggtgctgatg

SEQ ID NO: 3796 - RNA, 22 nt, synthetic construct
  source 1..22: mol_type = other RNA
acaaccccgaactaactgctgc

SEQ ID NO: 3797 - RNA, 22 nt, synthetic construct
  source 1..22: mol_type = other RNA
acactcaccattttgctcaaag

SEQ ID NO: 3798 - RNA, 22 nt, synthetic construct
  source 1..22: mol_type = other RNA
acagctgtgaggagaaagctat

SEQ ID NO: 3799 - RNA, 22 nt, synthetic construct
  source 1..22: mol_type = other RNA
acagctgtttctttgagcaaaa

SEQ ID NO: 3800 - RNA, 22 nt, synthetic construct
  source 1..22: mol_type = other RNA
acatggtgcaccatcagcacca

SEQ ID NO: 3801 - RNA, 22 nt, synthetic construct
  source 1..22: mol_type = other RNA
accacactcaccattttgctca

SEQ ID NO: 3802 - RNA, 22 nt, synthetic construct
  source 1..22: mol_type = other RNA
accatcagcaccacactcacca

SEQ ID NO: 3803 - RNA, 22 nt, synthetic construct
  source 1..22: mol_type = other RNA
accccgaactaactgctgcaag

SEQ ID NO: 3804 - RNA, 22 nt, synthetic construct
  source 1..22: mol_type = other RNA
accgtgcccagattctgacttc

SEQ ID NO: 3805 - RNA, 22 nt, synthetic construct
  source 1..22: mol_type = other RNA
acggttctggatctgcaacaga

SEQ ID NO: 3806 - RNA, 22 nt, synthetic construct
  source 1..22: mol_type = other RNA
actcaccattttgctcaaagaa

SEQ ID NO: 3807 - RNA, 22 nt, synthetic construct
  source 1..22: mol_type = other RNA
agaaacagctgtgaggagaaag

SEQ ID NO: 3808 - RNA, 22 nt, synthetic construct
  source 1..22: mol_type = other RNA
agaaccgtgcccagattctgac

SEQ ID NO: 3809 - RNA, 22 nt, synthetic construct
  source 1..22: mol_type = other RNA
agaatctgggcacggttctgga

SEQ ID NO: 3810 - RNA, 22 nt, synthetic construct
  source 1..22: mol_type = other RNA
agacatggtgcaccatcagcac

SEQ ID NO: 3811 - RNA, 22 nt, synthetic construct
  source 1..22: mol_type = other RNA
agaggaggaagtcagaatctgg

SEQ ID NO: 3812 - RNA, 22 nt, synthetic construct
  source 1..22: mol_type = other RNA
agatccagaaccgtgcccagat

SEQ ID NO: 3813 - RNA, 22 nt, synthetic construct
  source 1..22: mol_type = other RNA
agcaaaatggtgagtgtggtgc

SEQ ID NO: 3814 - RNA, 22 nt, synthetic construct
  source 1..22: mol_type = other RNA
agcaccacactcaccattttgc

SEQ ID NO: 3815 - RNA, 22 nt, synthetic construct
  source 1..22: mol_type = other RNA
agcagttagttcggggttgttt

SEQ ID NO: 3816 - RNA, 22 nt, synthetic construct
  source 1..22: mol_type = other RNA
agctgtgaggagaaagctataa

SEQ ID NO: 3817 - RNA, 22 nt, synthetic construct
  source 1..22: mol_type = other RNA
agctgtttctttgagcaaaatg

SEQ ID NO: 3818 - RNA, 22 nt, synthetic construct
  source 1..22: mol_type = other RNA
agctttctcctcacagctgttt

SEQ ID NO: 3819 - RNA, 22 nt, synthetic construct
  source 1..22: mol_type = other RNA
aggaagtcagaatctgggcacg

SEQ ID NO: 3820 - RNA, 22 nt, synthetic construct
  source 1..22: mol_type = other RNA
aggaggaagtcagaatctgggc

SEQ ID NO: 3821 - RNA, 22 nt, synthetic construct
  source 1..22: mol_type = other RNA
aggatccagaggaggaagtcag

SEQ ID NO: 3822 - RNA, 22 nt, synthetic construct
  source 1..22: mol_type = other RNA
aggctctgctttgttttctgtt

SEQ ID NO: 3823 - RNA, 22 nt, synthetic construct
  source 1..22: mol_type = other RNA
agggaggctctgctttgttttc

SEQ ID NO: 3824 - RNA, 22 nt, synthetic construct
  source 1..22: mol_type = other RNA
agtcagaatctgggcacggttc

SEQ ID NO: 3825 - RNA, 22 nt, synthetic construct
  source 1..22: mol_type = other RNA
agtgtggtgctgatggtgcacc

SEQ ID NO: 3826 - RNA, 22 nt, synthetic construct
  source 1..22: mol_type = other RNA
agttagttcggggttgtttttt

SEQ ID NO: 3827 - RNA, 22 nt, synthetic construct
  source 1..22: mol_type = other RNA
atagctttctcctcacagctgt

SEQ ID NO: 3828 - RNA, 22 nt, synthetic construct
  source 1..22: mol_type = other RNA
atcagacatggtgcaccatcag

SEQ ID NO: 3829 - RNA, 22 nt, synthetic construct
  source 1..22: mol_type = other RNA
atcagcaccacactcaccattt

SEQ ID NO: 3830 - RNA, 22 nt, synthetic construct
  source 1..22: mol_type = other RNA
atccagaaccgtgcccagattc

SEQ ID NO: 3831 - RNA, 22 nt, synthetic construct
  source 1..22: mol_type = other RNA
atccagaggaggaagtcagaat

SEQ ID NO: 3832 - RNA, 22 nt, synthetic construct
  source 1..22: mol_type = other RNA
atccttgcagcagttagttcgg

SEQ ID NO: 3833 - RNA, 22 nt, synthetic construct
  source 1..22: mol_type = other RNA
atctgcaacagaaaacaaagca

SEQ ID NO: 3834 - RNA, 22 nt, synthetic construct
  source 1..22: mol_type = other RNA
atctgggcacggttctggatct

SEQ ID NO: 3835 - RNA, 22 nt, synthetic construct
  source 1..22: mol_type = other RNA
atggtgagtgtggtgctgatgg

SEQ ID NO: 3836 - RNA, 22 nt, synthetic construct
  source 1..22: mol_type = other RNA
atggtgcaccatcagcaccaca

SEQ ID NO: 3837 - RNA, 22 nt, synthetic construct
  source 1..22: mol_type = other RNA
attttgctcaaagaaacagctg

SEQ ID NO: 3838 - RNA, 22 nt, synthetic construct
  source 1..22: mol_type = other RNA
caaaatggtgagtgtggtgctg

SEQ ID NO: 3839 - RNA, 22 nt, synthetic construct
  source 1..22: mol_type = other RNA
caaagaaacagctgtgaggaga

SEQ ID NO: 3840 - RNA, 22 nt, synthetic construct
  source 1..22: mol_type = other RNA
caacagaaaacaaagcagagcc

SEQ ID NO: 3841 - RNA, 22 nt, synthetic construct
  source 1..22: mol_type = other RNA
caaccccgaactaactgctgca

SEQ ID NO: 3842 - RNA, 22 nt, synthetic construct
  source 1..22: mol_type = other RNA
cacactcaccattttgctcaaa

SEQ ID NO: 3843 - RNA, 22 nt, synthetic construct
  source 1..22: mol_type = other RNA
cacagctgtttctttgagcaaa

SEQ ID NO: 3844 - RNA, 22 nt, synthetic construct
  source 1..22: mol_type = other RNA
caccacactcaccattttgctc

SEQ ID NO: 3845 - RNA, 22 nt, synthetic construct
  source 1..22: mol_type = other RNA
caccatcagcaccacactcacc

SEQ ID NO: 3846 - RNA, 22 nt, synthetic construct
  source 1..22: mol_type = other RNA
cacggttctggatctgcaacag

SEQ ID NO: 3847 - RNA, 22 nt, synthetic construct
  source 1..22: mol_type = other RNA
cactcaccattttgctcaaaga

SEQ ID NO: 3848 - RNA, 22 nt, synthetic construct
  source 1..22: mol_type = other RNA
cagaaccgtgcccagattctga

SEQ ID NO: 3849 - RNA, 22 nt, synthetic construct
  source 1..22: mol_type = other RNA
cagaatctgggcacggttctgg

SEQ ID NO: 3850 - RNA, 22 nt, synthetic construct
  source 1..22: mol_type = other RNA
cagacatggtgcaccatcagca

SEQ ID NO: 3851 - RNA, 22 nt, synthetic construct
  source 1..22: mol_type = other RNA
cagaggaggaagtcagaatctg

SEQ ID NO: 3852 - RNA, 22 nt, synthetic construct
  source 1..22: mol_type = other RNA
cagatccagaaccgtgcccaga

SEQ ID NO: 3853 - RNA, 22 nt, synthetic construct
  source 1..22: mol_type = other RNA
cagcaccacactcaccattttg

SEQ ID NO: 3854 - RNA, 22 nt, synthetic construct
  source 1..22: mol_type = other RNA
cagcagttagttcggggttgtt

SEQ ID NO: 3855 - RNA, 22 nt, synthetic construct
  source 1..22: mol_type = other RNA
cagctgtgaggagaaagctata

SEQ ID NO: 3856 - RNA, 22 nt, synthetic construct
  source 1..22: mol_type = other RNA
cagctgtttctttgagcaaaat

SEQ ID NO: 3857 - RNA, 22 nt, synthetic construct
  source 1..22: mol_type = other RNA
cagggaggctctgctttgtttt

SEQ ID NO: 3858 - RNA, 22 nt, synthetic construct
  source 1..22: mol_type = other RNA
cagttagttcggggttgttttt

SEQ ID NO: 3859 - RNA, 22 nt, synthetic construct
  source 1..22: mol_type = other RNA
catcagcaccacactcaccatt

SEQ ID NO: 3860 - RNA, 22 nt, synthetic construct
  source 1..22: mol_type = other RNA
catggtgcaccatcagcaccac

SEQ ID NO: 3861 - RNA, 22 nt, synthetic construct
  source 1..22: mol_type = other RNA
ccacactcaccattttgctcaa

SEQ ID NO: 3862 - RNA, 22 nt, synthetic construct
  source 1..22: mol_type = other RNA
ccagaaccgtgcccagattctg

SEQ ID NO: 3863 - RNA, 22 nt, synthetic construct
  source 1..22: mol_type = other RNA
ccagaggaggaagtcagaatct

SEQ ID NO: 3864 - RNA, 22 nt, synthetic construct
  source 1..22: mol_type = other RNA
ccagattctgacttcctcctct

SEQ ID NO: 3865 - RNA, 22 nt, synthetic construct
  source 1..22: mol_type = other RNA
ccatcagcaccacactcaccat

SEQ ID NO: 3866 - RNA, 22 nt, synthetic construct
  source 1..22: mol_type = other RNA
cccagattctgacttcctcctc

SEQ ID NO: 3867 - RNA, 22 nt, synthetic construct
  source 1..22: mol_type = other RNA
ccccatcagacatggtgcacca

SEQ ID NO: 3868 - RNA, 22 nt, synthetic construct
  source 1..22: mol_type = other RNA
ccccgaactaactgctgcaagg

SEQ ID NO: 3869 - RNA, 22 nt, synthetic construct
  source 1..22: mol_type = other RNA
cccgaactaactgctgcaagga

SEQ ID NO: 3870 - RNA, 22 nt, synthetic construct
  source 1..22: mol_type = other RNA
ccgaactaactgctgcaaggat

SEQ ID NO: 3871 - RNA, 22 nt, synthetic construct
  source 1..22: mol_type = other RNA
ccgtgcccagattctgacttcc

SEQ ID NO: 3872 - RNA, 22 nt, synthetic construct
  source 1..22: mol_type = other RNA
cctcctctggatccttgcagca

SEQ ID NO: 3873 - RNA, 22 nt, synthetic construct
  source 1..22: mol_type = other RNA
cctctggatccttgcagcagtt

SEQ ID NO: 3874 - RNA, 22 nt, synthetic construct
  source 1..22: mol_type = other RNA
ccttgcagcagttagttcgggg

SEQ ID NO: 3875 - RNA, 22 nt, synthetic construct
  source 1..22: mol_type = other RNA
cgaactaactgctgcaaggatc

SEQ ID NO: 3876 - RNA, 22 nt, synthetic construct
  source 1..22: mol_type = other RNA
cggttctggatctgcaacagaa

SEQ ID NO: 3877 - RNA, 22 nt, synthetic construct
  source 1..22: mol_type = other RNA
cgtgcccagattctgacttcct

SEQ ID NO: 3878 - RNA, 22 nt, synthetic construct
  source 1..22: mol_type = other RNA
ctcaaagaaacagctgtgagga

SEQ ID NO: 3879 - RNA, 22 nt, synthetic construct
  source 1..22: mol_type = other RNA
ctcaccattttgctcaaagaaa

SEQ ID NO: 3880 - RNA, 22 nt, synthetic construct
  source 1..22: mol_type = other RNA
ctcagggaggctctgctttgtt

SEQ ID NO: 3881 - RNA, 22 nt, synthetic construct
  source 1..22: mol_type = other RNA
ctcctctggatccttgcagcag

SEQ ID NO: 3882 - RNA, 22 nt, synthetic construct
  source 1..22: mol_type = other RNA
ctctgctttgttttctgttgca

SEQ ID NO: 3883 - RNA, 22 nt, synthetic construct
  source 1..22: mol_type = other RNA
ctctggatccttgcagcagtta

SEQ ID NO: 3884 - RNA, 22 nt, synthetic construct
  source 1..22: mol_type = other RNA
ctgcaacagaaaacaaagcaga

SEQ ID NO: 3885 - RNA, 22 nt, synthetic construct
  source 1..22: mol_type = other RNA
ctgctttgttttctgttgcaga

SEQ ID NO: 3886 - RNA, 22 nt, synthetic construct
  source 1..22: mol_type = other RNA
ctggatccttgcagcagttagt

SEQ ID NO: 3887 - RNA, 22 nt, synthetic construct
  source 1..22: mol_type = other RNA
ctggatctgcaacagaaaacaa

SEQ ID NO: 3888 - RNA, 22 nt, synthetic construct
  source 1..22: mol_type = other RNA
ctgggcacggttctggatctgc

SEQ ID NO: 3889 - RNA, 22 nt, synthetic construct
  source 1..22: mol_type = other RNA
ctgtgaggagaaagctataaaa

SEQ ID NO: 3890 - RNA, 22 nt, synthetic construct
  source 1..22: mol_type = other RNA
ctgttgcagatccagaaccgtg

SEQ ID NO: 3891 - RNA, 22 nt, synthetic construct
  source 1..22: mol_type = other RNA
ctgtttctttgagcaaaatggt

SEQ ID NO: 3892 - RNA, 22 nt, synthetic construct
  source 1..22: mol_type = other RNA
cttgcagcagttagttcggggt

SEQ ID NO: 3893 - RNA, 22 nt, synthetic construct
  source 1..22: mol_type = other RNA
ctttctcctcacagctgtttct

SEQ ID NO: 3894 - RNA, 22 nt, synthetic construct
  source 1..22: mol_type = other RNA
ctttgagcaaaatggtgagtgt

SEQ ID NO: 3895 - RNA, 22 nt, synthetic construct
  source 1..22: mol_type = other RNA
ctttgttttctgttgcagatcc

SEQ ID NO: 3896 - RNA, 22 nt, synthetic construct
  source 1..22: mol_type = other RNA
gaaacagctgtgaggagaaagc

SEQ ID NO: 3897 - RNA, 22 nt, synthetic construct
  source 1..22: mol_type = other RNA
gaaccgtgcccagattctgact

SEQ ID NO: 3898 - RNA, 22 nt, synthetic construct
  source 1..22: mol_type = other RNA
gaactaactgctgcaaggatcc

SEQ ID NO: 3899 - RNA, 22 nt, synthetic construct
  source 1..22: mol_type = other RNA
gaagtcagaatctgggcacggt

SEQ ID NO: 3900 - RNA, 22 nt, synthetic construct
  source 1..22: mol_type = other RNA
gaatctgggcacggttctggat

SEQ ID NO: 3901 - RNA, 22 nt, synthetic construct
  source 1..22: mol_type = other RNA
gacatggtgcaccatcagcacc

SEQ ID NO: 3902 - RNA, 22 nt, synthetic construct
  source 1..22: mol_type = other RNA
gagcaaaatggtgagtgtggtg

SEQ ID NO: 3903 - RNA, 22 nt, synthetic construct
  source 1..22: mol_type = other RNA
gaggaagtcagaatctgggcac

SEQ ID NO: 3904 - RNA, 22 nt, synthetic construct
  source 1..22: mol_type = other RNA
gaggaggaagtcagaatctggg

SEQ ID NO: 3905 - RNA, 22 nt, synthetic construct
  source 1..22: mol_type = other RNA
gaggctctgctttgttttctgt

SEQ ID NO: 3906 - RNA, 22 nt, synthetic construct
  source 1..22: mol_type = other RNA
gagtgtggtgctgatggtgcac

SEQ ID NO: 3907 - RNA, 22 nt, synthetic construct
  source 1..22: mol_type = other RNA
gatccagaaccgtgcccagatt

SEQ ID NO: 3908 - RNA, 22 nt, synthetic construct
  source 1..22: mol_type = other RNA
gatccagaggaggaagtcagaa

SEQ ID NO: 3909 - RNA, 22 nt, synthetic construct
  source 1..22: mol_type = other RNA
gatccttgcagcagttagttcg

SEQ ID NO: 3910 - RNA, 22 nt, synthetic construct
  source 1..22: mol_type = other RNA
gatctgcaacagaaaacaaagc

SEQ ID NO: 3911 - RNA, 22 nt, synthetic construct
  source 1..22: mol_type = other RNA
gcaaaatggtgagtgtggtgct

SEQ ID NO: 3912 - RNA, 22 nt, synthetic construct
  source 1..22: mol_type = other RNA
gcaacagaaaacaaagcagagc

SEQ ID NO: 3913 - RNA, 22 nt, synthetic construct
  source 1..22: mol_type = other RNA
gcaccacactcaccattttgct

SEQ ID NO: 3914 - RNA, 22 nt, synthetic construct
  source 1..22: mol_type = other RNA
gcaccatcagcaccacactcac

SEQ ID NO: 3915 - RNA, 22 nt, synthetic construct
  source 1..22: mol_type = other RNA
gcacggttctggatctgcaaca

SEQ ID NO: 3916 - RNA, 22 nt, synthetic construct
  source 1..22: mol_type = other RNA
gcagatccagaaccgtgcccag

SEQ ID NO: 3917 - RNA, 22 nt, synthetic construct
  source 1..22: mol_type = other RNA
gcagcagttagttcggggttgt

SEQ ID NO: 3918 - RNA, 22 nt, synthetic construct
  source 1..22: mol_type = other RNA
gcagttagttcggggttgtttt

SEQ ID NO: 3919 - RNA, 22 nt, synthetic construct
  source 1..22: mol_type = other RNA
gcccagattctgacttcctcct

SEQ ID NO: 3920 - RNA, 22 nt, synthetic construct
  source 1..22: mol_type = other RNA
gctcaaagaaacagctgtgagg

SEQ ID NO: 3921 - RNA, 22 nt, synthetic construct
  source 1..22: mol_type = other RNA
gctctgctttgttttctgttgc

SEQ ID NO: 3922 - RNA, 22 nt, synthetic construct
  source 1..22: mol_type = other RNA
gctgtgaggagaaagctataaa

SEQ ID NO: 3923 - RNA, 22 nt, synthetic construct
  source 1..22: mol_type = other RNA
gctgtttctttgagcaaaatgg

SEQ ID NO: 3924 - RNA, 22 nt, synthetic construct
  source 1..22: mol_type = other RNA
gctttctcctcacagctgtttc

SEQ ID NO: 3925 - RNA, 22 nt, synthetic construct
  source 1..22: mol_type = other RNA
gctttgttttctgttgcagatc

SEQ ID NO: 3926 - RNA, 22 nt, synthetic construct
  source 1..22: mol_type = other RNA
ggaagtcagaatctgggcacgg

SEQ ID NO: 3927 - RNA, 22 nt, synthetic construct
  source 1..22: mol_type = other RNA
ggaggaagtcagaatctgggca

SEQ ID NO: 3928 - RNA, 22 nt, synthetic construct
  source 1..22: mol_type = other RNA
ggaggctctgctttgttttctg

SEQ ID NO: 3929 - RNA, 22 nt, synthetic construct
  source 1..22: mol_type = other RNA
ggatccagaggaggaagtcaga

SEQ ID NO: 3930 - RNA, 22 nt, synthetic construct
  source 1..22: mol_type = other RNA
ggatccttgcagcagttagttc

SEQ ID NO: 3931 - RNA, 22 nt, synthetic construct
  source 1..22: mol_type = other RNA
ggatctgcaacagaaaacaaag

SEQ ID NO: 3932 - RNA, 22 nt, synthetic construct
  source 1..22: mol_type = other RNA
ggcacggttctggatctgcaac

SEQ ID NO: 3933 - RNA, 22 nt, synthetic construct
  source 1..22: mol_type = other RNA
ggctctgctttgttttctgttg

SEQ ID NO: 3934 - RNA, 22 nt, synthetic construct
  source 1..22: mol_type = other RNA
gggaggctctgctttgttttct

SEQ ID NO: 3935 - RNA, 22 nt, synthetic construct
  source 1..22: mol_type = other RNA
gggcacggttctggatctgcaa

SEQ ID NO: 3936 - RNA, 22 nt, synthetic construct
  source 1..22: mol_type = other RNA
ggtgagtgtggtgctgatggtg

SEQ ID NO: 3937 - RNA, 22 nt, synthetic construct
  source 1..22: mol_type = other RNA
ggtgcaccatcagcaccacact

SEQ ID NO: 3938 - RNA, 22 nt, synthetic construct
  source 1..22: mol_type = other RNA
ggtgctgatggtgcaccatgtc

SEQ ID NO: 3939 - RNA, 22 nt, synthetic construct
  source 1..22: mol_type = other RNA
ggttctggatctgcaacagaaa

SEQ ID NO: 3940 - RNA, 22 nt, synthetic construct
  source 1..22: mol_type = other RNA
gtcagaatctgggcacggttct

SEQ ID NO: 3941 - RNA, 22 nt, synthetic construct
  source 1..22: mol_type = other RNA
gtgaggagaaagctataaaaaa

SEQ ID NO: 3942 - RNA, 22 nt, synthetic construct
  source 1..22: mol_type = other RNA
gtgagtgtggtgctgatggtgc

SEQ ID NO: 3943 - RNA, 22 nt, synthetic construct
  source 1..22: mol_type = other RNA
gtgcaccatcagcaccacactc

SEQ ID NO: 3944 - RNA, 22 nt, synthetic construct
  source 1..22: mol_type = other RNA
gtgcccagattctgacttcctc

SEQ ID NO: 3945 - RNA, 22 nt, synthetic construct
  source 1..22: mol_type = other RNA
gtgtggtgctgatggtgcacca

SEQ ID NO: 3946 - RNA, 22 nt, synthetic construct
  source 1..22: mol_type = other RNA
gttctggatctgcaacagaaaa

SEQ ID NO: 3947 - RNA, 22 nt, synthetic construct
  source 1..22: mol_type = other RNA
gttgcagatccagaaccgtgcc

SEQ ID NO: 3948 - RNA, 22 nt, synthetic construct
  source 1..22: mol_type = other RNA
gtttctttgagcaaaatggtga

SEQ ID NO: 3949 - RNA, 22 nt, synthetic construct
  source 1..22: mol_type = other RNA
gttttctgttgcagatccagaa

SEQ ID NO: 3950 - RNA, 22 nt, synthetic construct
  source 1..22: mol_type = other RNA
tagctttctcctcacagctgtt

SEQ ID NO: 3951 - RNA, 22 nt, synthetic construct
  source 1..22: mol_type = other RNA
tatagctttctcctcacagctg

SEQ ID NO: 3952 - RNA, 22 nt, synthetic construct
  source 1..22: mol_type = other RNA
tcaaagaaacagctgtgaggag

SEQ ID NO: 3953 - RNA, 22 nt, synthetic construct
  source 1..22: mol_type = other RNA
tcagaatctgggcacggttctg

SEQ ID NO: 3954 - RNA, 22 nt, synthetic construct
  source 1..22: mol_type = other RNA
tcagacatggtgcaccatcagc

SEQ ID NO: 3955 - RNA, 22 nt, synthetic construct
  source 1..22: mol_type = other RNA
tcagcaccacactcaccatttt

SEQ ID NO: 3956 - RNA, 22 nt, synthetic construct
  source 1..22: mol_type = other RNA
tcagggaggctctgctttgttt

SEQ ID NO: 3957 - RNA, 22 nt, synthetic construct
  source 1..22: mol_type = other RNA
tccagaaccgtgcccagattct

SEQ ID NO: 3958 - RNA, 22 nt, synthetic construct
  source 1..22: mol_type = other RNA
tccagaggaggaagtcagaatc

SEQ ID NO: 3959 - RNA, 22 nt, synthetic construct
  source 1..22: mol_type = other RNA
tcctctggatccttgcagcagt

SEQ ID NO: 3960 - RNA, 22 nt, synthetic construct
  source 1..22: mol_type = other RNA
tccttgcagcagttagttcggg

SEQ ID NO: 3961 - RNA, 22 nt, synthetic construct
  source 1..22: mol_type = other RNA
tctcctcacagctgtttctttg

SEQ ID NO: 3962 - RNA, 22 nt, synthetic construct
  source 1..22: mol_type = other RNA
tctgcaacagaaaacaaagcag

SEQ ID NO: 3963 - RNA, 22 nt, synthetic construct
  source 1..22: mol_type = other RNA
tctgctttgttttctgttgcag

SEQ ID NO: 3964 - RNA, 22 nt, synthetic construct
  source 1..22: mol_type = other RNA
tctggatccttgcagcagttag

SEQ ID NO: 3965 - RNA, 22 nt, synthetic construct
  source 1..22: mol_type = other RNA
tctggatctgcaacagaaaaca

SEQ ID NO: 3966 - RNA, 22 nt, synthetic construct
  source 1..22: mol_type = other RNA
tctgggcacggttctggatctg

SEQ ID NO: 3967 - RNA, 22 nt, synthetic construct
  source 1..22: mol_type = other RNA
tctgttgcagatccagaaccgt

SEQ ID NO: 3968 - RNA, 22 nt, synthetic construct
  source 1..22: mol_type = other RNA
tctttgagcaaaatggtgagtg

SEQ ID NO: 3969 - RNA, 22 nt, synthetic construct
  source 1..22: mol_type = other RNA
tgagcaaaatggtgagtgtggt

SEQ ID NO: 3970 - RNA, 22 nt, synthetic construct
  source 1..22: mol_type = other RNA
tgagtgtggtgctgatggtgca

SEQ ID NO: 3971 - RNA, 22 nt, synthetic construct
  source 1..22: mol_type = other RNA
tgcaacagaaaacaaagcagag

SEQ ID NO: 3972 - RNA, 22 nt, synthetic construct
  source 1..22: mol_type = other RNA
tgcaccatcagcaccacactca

SEQ ID NO: 3973 - RNA, 22 nt, synthetic construct
  source 1..22: mol_type = other RNA
tgcagatccagaaccgtgccca

SEQ ID NO: 3974 - RNA, 22 nt, synthetic construct
  source 1..22: mol_type = other RNA
tgcagcagttagttcggggttg

SEQ ID NO: 3975 - RNA, 22 nt, synthetic construct
  source 1..22: mol_type = other RNA
tgcccagattctgacttcctcc

SEQ ID NO: 3976 - RNA, 22 nt, synthetic construct
  source 1..22: mol_type = other RNA
tgctcaaagaaacagctgtgag

SEQ ID NO: 3977 - RNA, 22 nt, synthetic construct
  source 1..22: mol_type = other RNA
tgctttgttttctgttgcagat

SEQ ID NO: 3978 - RNA, 22 nt, synthetic construct
  source 1..22: mol_type = other RNA
tggatccttgcagcagttagtt

SEQ ID NO: 3979 - RNA, 22 nt, synthetic construct
  source 1..22: mol_type = other RNA
tggatctgcaacagaaaacaaa

SEQ ID NO: 3980 - RNA, 22 nt, synthetic construct
  source 1..22: mol_type = other RNA
tgggcacggttctggatctgca

SEQ ID NO: 3981 - RNA, 22 nt, synthetic construct
  source 1..22: mol_type = other RNA
tggtgagtgtggtgctgatggt

SEQ ID NO: 3982 - RNA, 22 nt, synthetic construct
  source 1..22: mol_type = other RNA
tggtgcaccatcagcaccacac

SEQ ID NO: 3983 - RNA, 22 nt, synthetic construct
  source 1..22: mol_type = other RNA
tgtgaggagaaagctataaaaa

SEQ ID NO: 3984 - RNA, 22 nt, synthetic construct
  source 1..22: mol_type = other RNA
tgttgcagatccagaaccgtgc

SEQ ID NO: 3985 - RNA, 22 nt, synthetic construct
  source 1..22: mol_type = other RNA
tgtttctttgagcaaaatggtg

SEQ ID NO: 3986 - RNA, 22 nt, synthetic construct
  source 1..22: mol_type = other RNA
tgttttctgttgcagatccaga

SEQ ID NO: 3987 - RNA, 22 nt, synthetic construct
  source 1..22: mol_type = other RNA
ttatagctttctcctcacagct

SEQ ID NO: 3988 - RNA, 22 nt, synthetic construct
  source 1..22: mol_type = other RNA
ttctcctcacagctgtttcttt

SEQ ID NO: 3989 - RNA, 22 nt, synthetic construct
  source 1..22: mol_type = other RNA
ttctggatctgcaacagaaaac

SEQ ID NO: 3990 - RNA, 22 nt, synthetic construct
  source 1..22: mol_type = other RNA
ttctgttgcagatccagaaccg

SEQ ID NO: 3991 - RNA, 22 nt, synthetic construct
  source 1..22: mol_type = other RNA
ttctttgagcaaaatggtgagt

SEQ ID NO: 3992 - RNA, 22 nt, synthetic construct
  source 1..22: mol_type = other RNA
ttgagcaaaatggtgagtgtgg

SEQ ID NO: 3993 - RNA, 22 nt, synthetic construct
  source 1..22: mol_type = other RNA
ttgcagatccagaaccgtgccc

SEQ ID NO: 3994 - RNA, 22 nt, synthetic construct
  source 1..22: mol_type = other RNA
ttgcagcagttagttcggggtt

SEQ ID NO: 3995 - RNA, 22 nt, synthetic construct
  source 1..22: mol_type = other RNA
ttgctcaaagaaacagctgtga

SEQ ID NO: 3996 - RNA, 22 nt, synthetic construct
  source 1..22: mol_type = other RNA
ttgttttctgttgcagatccag

SEQ ID NO: 3997 - RNA, 22 nt, synthetic construct
  source 1..22: mol_type = other RNA
tttatagctttctcctcacagc

SEQ ID NO: 3998 - RNA, 22 nt, synthetic construct
  source 1..22: mol_type = other RNA
tttctcctcacagctgtttctt

SEQ ID NO: 3999 - RNA, 22 nt, synthetic construct
  source 1..22: mol_type = other RNA
tttctgttgcagatccagaacc

SEQ ID NO: 4000 - RNA, 22 nt, synthetic construct
  source 1..22: mol_type = other RNA
tttctttgagcaaaatggtgag

SEQ ID NO: 4001 - RNA, 22 nt, synthetic construct
  source 1..22: mol_type = other RNA
tttgagcaaaatggtgagtgtg

SEQ ID NO: 4002 - RNA, 22 nt, synthetic construct
  source 1..22: mol_type = other RNA
tttgctcaaagaaacagctgtg

SEQ ID NO: 4003 - RNA, 22 nt, synthetic construct
  source 1..22: mol_type = other RNA
tttgttttctgttgcagatcca

SEQ ID NO: 4004 - RNA, 22 nt, synthetic construct
  source 1..22: mol_type = other RNA
ttttatagctttctcctcacag

SEQ ID NO: 4005 - RNA, 22 nt, synthetic construct
  source 1..22: mol_type = other RNA
ttttctgttgcagatccagaac

SEQ ID NO: 4006 - RNA, 22 nt, synthetic construct
  source 1..22: mol_type = other RNA
ttttgctcaaagaaacagctgt

SEQ ID NO: 4007 - RNA, 22 nt, synthetic construct
  source 1..22: mol_type = other RNA
tttttatagctttctcctcaca

SEQ ID NO: 4008 - RNA, 22 nt, synthetic construct
  source 1..22: mol_type = other RNA
ttttttatagctttctcctcac

SEQ ID NO: 4009 - RNA, 20 nt, synthetic construct
  source 1..20: mol_type = other RNA
aaaagaagccctcttacaac

SEQ ID NO: 4010 - RNA, 20 nt, synthetic construct
  source 1..20: mol_type = other RNA
aaaagcaatttcagccttat

SEQ ID NO: 4011 - RNA, 20 nt, synthetic construct
  source 1..20: mol_type = other RNA
aaaataaggctgaaattgct

SEQ ID NO: 4012 - RNA, 20 nt, synthetic construct
  source 1..20: mol_type = other RNA
aaaatgcccccaacagagcc

SEQ ID NO: 4013 - RNA, 20 nt, synthetic construct
  source 1..20: mol_type = other RNA
aaacacaaaaagaaacagta

SEQ ID NO: 4014 - RNA, 20 nt, synthetic construct
  source 1..20: mol_type = other RNA
aaaccattatgaagaagaga

SEQ ID NO: 4015 - RNA, 20 nt, synthetic construct
  source 1..20: mol_type = other RNA
aaagaaaagaagccctctta

SEQ ID NO: 4016 - RNA, 20 nt, synthetic construct
  source 1..20: mol_type = other RNA
aaagaagccctcttacaaca

SEQ ID NO: 4017 - RNA, 20 nt, synthetic construct
  source 1..20: mol_type = other RNA
aaagcaatttcagccttatt

SEQ ID NO: 4018 - RNA, 20 nt, synthetic construct
  source 1..20: mol_type = other RNA
aaataaggctgaaattgctt

SEQ ID NO: 4019 - RNA, 20 nt, synthetic construct
  source 1..20: mol_type = other RNA
aaatatggactctcttcttc

SEQ ID NO: 4020 - RNA, 20 nt, synthetic construct
  source 1..20: mol_type = other RNA
aaatgcccccaacagagcca

SEQ ID NO: 4021 - RNA, 20 nt, synthetic construct
  source 1..20: mol_type = other RNA
aaattgaaatatggactctc

SEQ ID NO: 4022 - RNA, 20 nt, synthetic construct
  source 1..20: mol_type = other RNA
aaattgcttttcacattctg

SEQ ID NO: 4023 - RNA, 20 nt, synthetic construct
  source 1..20: mol_type = other RNA
aacacaaaaagaaacagtaa

SEQ ID NO: 4024 - RNA, 20 nt, synthetic construct
  source 1..20: mol_type = other RNA
aacagagccagaatgtgaaa

SEQ ID NO: 4025 - RNA, 20 nt, synthetic construct
  source 1..20: mol_type = other RNA
aacaggggtctatgtgaaaa

SEQ ID NO: 4026 - RNA, 20 nt, synthetic construct
  source 1..20: mol_type = other RNA
aaccattatgaagaagagag

SEQ ID NO: 4027 - RNA, 20 nt, synthetic construct
  source 1..20: mol_type = other RNA
aagaaaagaagccctcttac

SEQ ID NO: 4028 - RNA, 20 nt, synthetic construct
  source 1..20: mol_type = other RNA
aagaagccctcttacaacag

SEQ ID NO: 4029 - RNA, 20 nt, synthetic construct
  source 1..20: mol_type = other RNA
aagagggcttcttttcttta

SEQ ID NO: 4030 - RNA, 20 nt, synthetic construct
  source 1..20: mol_type = other RNA
aagcaatttcagccttattt

SEQ ID NO: 4031 - RNA, 20 nt, synthetic construct
  source 1..20: mol_type = other RNA
aagccctcttacaacagggg

SEQ ID NO: 4032 - RNA, 20 nt, synthetic construct
  source 1..20: mol_type = other RNA
aaggctgaaattgcttttca

SEQ ID NO: 4033 - RNA, 20 nt, synthetic construct
  source 1..20: mol_type = other RNA
aataaggctgaaattgcttt

SEQ ID NO: 4034 - RNA, 20 nt, synthetic construct
  source 1..20: mol_type = other RNA
aatatggactctcttcttca

SEQ ID NO: 4035 - RNA, 20 nt, synthetic construct
  source 1..20: mol_type = other RNA
aatgcccccaacagagccag

SEQ ID NO: 4036 - RNA, 20 nt, synthetic construct
  source 1..20: mol_type = other RNA
aatggtttctcaattgatgg

SEQ ID NO: 4037 - RNA, 20 nt, synthetic construct
  source 1..20: mol_type = other RNA
aatgtgaaaagcaatttcag

SEQ ID NO: 4038 - RNA, 20 nt, synthetic construct
  source 1..20: mol_type = other RNA
aattactgtttctttttgtg

SEQ ID NO: 4039 - RNA, 20 nt, synthetic construct
  source 1..20: mol_type = other RNA
aattgaaatatggactctct

SEQ ID NO: 4040 - RNA, 20 nt, synthetic construct
  source 1..20: mol_type = other RNA
aattgagaaaccattatgaa

SEQ ID NO: 4041 - RNA, 20 nt, synthetic construct
  source 1..20: mol_type = other RNA
aattgcttttcacattctgg

SEQ ID NO: 4042 - RNA, 20 nt, synthetic construct
  source 1..20: mol_type = other RNA
acaacaggggtctatgtgaa

SEQ ID NO: 4043 - RNA, 20 nt, synthetic construct
  source 1..20: mol_type = other RNA
acacaaaaagaaacagtaat

SEQ ID NO: 4044 - RNA, 20 nt, synthetic construct
  source 1..20: mol_type = other RNA
acagagccagaatgtgaaaa

SEQ ID NO: 4045 - RNA, 20 nt, synthetic construct
  source 1..20: mol_type = other RNA
acagctaaagaaaagaagcc

SEQ ID NO: 4046 - RNA, 20 nt, synthetic construct
  source 1..20: mol_type = other RNA
acaggggtctatgtgaaaat

SEQ ID NO: 4047 - RNA, 20 nt, synthetic construct
  source 1..20: mol_type = other RNA
acatagacccctgttgtaag

SEQ ID NO: 4048 - RNA, 20 nt, synthetic construct
  source 1..20: mol_type = other RNA
acattctggctctgttgggg

SEQ ID NO: 4049 - RNA, 20 nt, synthetic construct
  source 1..20: mol_type = other RNA
accattatgaagaagagagt

SEQ ID NO: 4050 - RNA, 20 nt, synthetic construct
  source 1..20: mol_type = other RNA
acccctgttgtaagagggct

SEQ ID NO: 4051 - RNA, 20 nt, synthetic construct
  source 1..20: mol_type = other RNA
actctcttcttcataatggt

SEQ ID NO: 4052 - RNA, 20 nt, synthetic construct
  source 1..20: mol_type = other RNA
actgtttctttttgtgtttg

SEQ ID NO: 4053 - RNA, 20 nt, synthetic construct
  source 1..20: mol_type = other RNA
agaaaagaagccctcttaca

SEQ ID NO: 4054 - RNA, 20 nt, synthetic construct
  source 1..20: mol_type = other RNA
agaaaccattatgaagaaga

SEQ ID NO: 4055 - RNA, 20 nt, synthetic construct
  source 1..20: mol_type = other RNA
agaagccctcttacaacagg

SEQ ID NO: 4056 - RNA, 20 nt, synthetic construct
  source 1..20: mol_type = other RNA
agaatgtgaaaagcaatttc

SEQ ID NO: 4057 - RNA, 20 nt, synthetic construct
  source 1..20: mol_type = other RNA
agacccctgttgtaagaggg

SEQ ID NO: 4058 - RNA, 20 nt, synthetic construct
  source 1..20: mol_type = other RNA
agagccagaatgtgaaaagc

SEQ ID NO: 4059 - RNA, 20 nt, synthetic construct
  source 1..20: mol_type = other RNA
agagggcttcttttctttag

SEQ ID NO: 4060 - RNA, 20 nt, synthetic construct
  source 1..20: mol_type = other RNA
agcaatttcagccttatttt

SEQ ID NO: 4061 - RNA, 20 nt, synthetic construct
  source 1..20: mol_type = other RNA
agccagaatgtgaaaagcaa

SEQ ID NO: 4062 - RNA, 20 nt, synthetic construct
  source 1..20: mol_type = other RNA
agccctcttacaacaggggt

SEQ ID NO: 4063 - RNA, 20 nt, synthetic construct
  source 1..20: mol_type = other RNA
agccttattttattcccatc

SEQ ID NO: 4064 - RNA, 20 nt, synthetic construct
  source 1..20: mol_type = other RNA
agctaaagaaaagaagccct

SEQ ID NO: 4065 - RNA, 20 nt, synthetic construct
  source 1..20: mol_type = other RNA
agctgtcaaacacaaaaaga

SEQ ID NO: 4066 - RNA, 20 nt, synthetic construct
  source 1..20: mol_type = other RNA
aggctgaaattgcttttcac

SEQ ID NO: 4067 - RNA, 20 nt, synthetic construct
  source 1..20: mol_type = other RNA
agggcttcttttctttagct

SEQ ID NO: 4068 - RNA, 20 nt, synthetic construct
  source 1..20: mol_type = other RNA
aggggtctatgtgaaaatgc

SEQ ID NO: 4069 - RNA, 20 nt, synthetic construct
  source 1..20: mol_type = other RNA
agtagtaattactgtttctt

SEQ ID NO: 4070 - RNA, 20 nt, synthetic construct
  source 1..20: mol_type = other RNA
ataaaataaggctgaaattg

SEQ ID NO: 4071 - RNA, 20 nt, synthetic construct
  source 1..20: mol_type = other RNA
ataaggctgaaattgctttt

SEQ ID NO: 4072 - RNA, 20 nt, synthetic construct
  source 1..20: mol_type = other RNA
ataatggtttctcaattgat

SEQ ID NO: 4073 - RNA, 20 nt, synthetic construct
  source 1..20: mol_type = other RNA
atagacccctgttgtaagag

SEQ ID NO: 4074 - RNA, 20 nt, synthetic construct
  source 1..20: mol_type = other RNA
atatggactctcttcttcat

SEQ ID NO: 4075 - RNA, 20 nt, synthetic construct
  source 1..20: mol_type = other RNA
atcaattgagaaaccattat

SEQ ID NO: 4076 - RNA, 20 nt, synthetic construct
  source 1..20: mol_type = other RNA
atgaagaagagagtccatat

SEQ ID NO: 4077 - RNA, 20 nt, synthetic construct
  source 1..20: mol_type = other RNA
atgcccccaacagagccaga

SEQ ID NO: 4078 - RNA, 20 nt, synthetic construct
  source 1..20: mol_type = other RNA
atggactctcttcttcataa

SEQ ID NO: 4079 - RNA, 20 nt, synthetic construct
  source 1..20: mol_type = other RNA
atgggaataaaataaggctg

SEQ ID NO: 4080 - RNA, 20 nt, synthetic construct
  source 1..20: mol_type = other RNA
atggtttctcaattgatggg

SEQ ID NO: 4081 - RNA, 20 nt, synthetic construct
  source 1..20: mol_type = other RNA
atgtgaaaagcaatttcagc

SEQ ID NO: 4082 - RNA, 20 nt, synthetic construct
  source 1..20: mol_type = other RNA
atgtgaaaatgcccccaaca

SEQ ID NO: 4083 - RNA, 20 nt, synthetic construct
  source 1..20: mol_type = other RNA
attactgtttctttttgtgt

SEQ ID NO: 4084 - RNA, 20 nt, synthetic construct
  source 1..20: mol_type = other RNA
attatgaagaagagagtcca

SEQ ID NO: 4085 - RNA, 20 nt, synthetic construct
  source 1..20: mol_type = other RNA
attcccatcaattgagaaac

SEQ ID NO: 4086 - RNA, 20 nt, synthetic construct
  source 1..20: mol_type = other RNA
attctggctctgttgggggc

SEQ ID NO: 4087 - RNA, 20 nt, synthetic construct
  source 1..20: mol_type = other RNA
attgaaatatggactctctt

SEQ ID NO: 4088 - RNA, 20 nt, synthetic construct
  source 1..20: mol_type = other RNA
attgagaaaccattatgaag

SEQ ID NO: 4089 - RNA, 20 nt, synthetic construct
  source 1..20: mol_type = other RNA
attgatgggaataaaataag

SEQ ID NO: 4090 - RNA, 20 nt, synthetic construct
  source 1..20: mol_type = other RNA
attgcttttcacattctggc

SEQ ID NO: 4091 - RNA, 20 nt, synthetic construct
  source 1..20: mol_type = other RNA
atttcagccttattttattc

SEQ ID NO: 4092 - RNA, 20 nt, synthetic construct
  source 1..20: mol_type = other RNA
attttattcccatcaattga

SEQ ID NO: 4093 - RNA, 20 nt, synthetic construct
  source 1..20: mol_type = other RNA
attttcacatagacccctgt

SEQ ID NO: 4094 - RNA, 20 nt, synthetic construct
  source 1..20: mol_type = other RNA
caaaaagaaacagtaattac

SEQ ID NO: 4095 - RNA, 20 nt, synthetic construct
  source 1..20: mol_type = other RNA
caaacacaaaaagaaacagt

SEQ ID NO: 4096 - RNA, 20 nt, synthetic construct
  source 1..20: mol_type = other RNA
caacagagccagaatgtgaa

SEQ ID NO: 4097 - RNA, 20 nt, synthetic construct
  source 1..20: mol_type = other RNA
caacaggggtctatgtgaaa

SEQ ID NO: 4098 - RNA, 20 nt, synthetic construct
  source 1..20: mol_type = other RNA
caattgagaaaccattatga

SEQ ID NO: 4099 - RNA, 20 nt, synthetic construct
  source 1..20: mol_type = other RNA
caattgatgggaataaaata

SEQ ID NO: 4100 - RNA, 20 nt, synthetic construct
  source 1..20: mol_type = other RNA
caatttcagccttattttat

SEQ ID NO: 4101 - RNA, 20 nt, synthetic construct
  source 1..20: mol_type = other RNA
cacaaaaagaaacagtaatt

SEQ ID NO: 4102 - RNA, 20 nt, synthetic construct
  source 1..20: mol_type = other RNA
cacatagacccctgttgtaa

SEQ ID NO: 4103 - RNA, 20 nt, synthetic construct
  source 1..20: mol_type = other RNA
cacattctggctctgttggg

SEQ ID NO: 4104 - RNA, 20 nt, synthetic construct
  source 1..20: mol_type = other RNA
cagaatgtgaaaagcaattt

SEQ ID NO: 4105 - RNA, 20 nt, synthetic construct
  source 1..20: mol_type = other RNA
cagagccagaatgtgaaaag

SEQ ID NO: 4106 - RNA, 20 nt, synthetic construct
  source 1..20: mol_type = other RNA
cagccttattttattcccat

SEQ ID NO: 4107 - RNA, 20 nt, synthetic construct
  source 1..20: mol_type = other RNA
cagctaaagaaaagaagccc

SEQ ID NO: 4108 - RNA, 20 nt, synthetic construct
  source 1..20: mol_type = other RNA
caggggtctatgtgaaaatg

SEQ ID NO: 4109 - RNA, 20 nt, synthetic construct
  source 1..20: mol_type = other RNA
cagtagtaattactgtttct

SEQ ID NO: 4110 - RNA, 20 nt, synthetic construct
  source 1..20: mol_type = other RNA
cataatggtttctcaattga

SEQ ID NO: 4111 - RNA, 20 nt, synthetic construct
  source 1..20: mol_type = other RNA
catagacccctgttgtaaga

SEQ ID NO: 4112 - RNA, 20 nt, synthetic construct
  source 1..20: mol_type = other RNA
catcaattgagaaaccatta

SEQ ID NO: 4113 - RNA, 20 nt, synthetic construct
  source 1..20: mol_type = other RNA
cattatgaagaagagagtcc

SEQ ID NO: 4114 - RNA, 20 nt, synthetic construct
  source 1..20: mol_type = other RNA
cattctggctctgttggggg

SEQ ID NO: 4115 - RNA, 20 nt, synthetic construct
  source 1..20: mol_type = other RNA
cattttcacatagacccctg

SEQ ID NO: 4116 - RNA, 20 nt, synthetic construct
  source 1..20: mol_type = other RNA
ccaacagagccagaatgtga

SEQ ID NO: 4117 - RNA, 20 nt, synthetic construct
  source 1..20: mol_type = other RNA
ccagaatgtgaaaagcaatt

SEQ ID NO: 4118 - RNA, 20 nt, synthetic construct
  source 1..20: mol_type = other RNA
ccatcaattgagaaaccatt

SEQ ID NO: 4119 - RNA, 20 nt, synthetic construct
  source 1..20: mol_type = other RNA
ccattatgaagaagagagtc

SEQ ID NO: 4120 - RNA, 20 nt, synthetic construct
  source 1..20: mol_type = other RNA
cccaacagagccagaatgtg

SEQ ID NO: 4121 - RNA, 20 nt, synthetic construct
  source 1..20: mol_type = other RNA
cccatcaattgagaaaccat

SEQ ID NO: 4122 - RNA, 20 nt, synthetic construct
  source 1..20: mol_type = other RNA
ccccaacagagccagaatgt

SEQ ID NO: 4123 - RNA, 20 nt, synthetic construct
  source 1..20: mol_type = other RNA
cccccaacagagccagaatg

SEQ ID NO: 4124 - RNA, 20 nt, synthetic construct
  source 1..20: mol_type = other RNA
cccctgttgtaagagggctt

SEQ ID NO: 4125 - RNA, 20 nt, synthetic construct
  source 1..20: mol_type = other RNA
ccctcttacaacaggggtct

SEQ ID NO: 4126 - RNA, 20 nt, synthetic construct
  source 1..20: mol_type = other RNA
ccctgttgtaagagggcttc

SEQ ID NO: 4127 - RNA, 20 nt, synthetic construct
  source 1..20: mol_type = other RNA
cctcagtagtaattactgtt

SEQ ID NO: 4128 - RNA, 20 nt, synthetic construct
  source 1..20: mol_type = other RNA
cctcttacaacaggggtcta

SEQ ID NO: 4129 - RNA, 20 nt, synthetic construct
  source 1..20: mol_type = other RNA
cctgttgtaagagggcttct

SEQ ID NO: 4130 - RNA, 20 nt, synthetic construct
  source 1..20: mol_type = other RNA
ccttattttattcccatcaa

SEQ ID NO: 4131 - RNA, 20 nt, synthetic construct
  source 1..20: mol_type = other RNA
ctaaagaaaagaagccctct

SEQ ID NO: 4132 - RNA, 20 nt, synthetic construct
  source 1..20: mol_type = other RNA
ctatgtgaaaatgcccccaa

SEQ ID NO: 4133 - RNA, 20 nt, synthetic construct
  source 1..20: mol_type = other RNA
ctcaattgatgggaataaaa

SEQ ID NO: 4134 - RNA, 20 nt, synthetic construct
  source 1..20: mol_type = other RNA
ctcagtagtaattactgttt

SEQ ID NO: 4135 - RNA, 20 nt, synthetic construct
  source 1..20: mol_type = other RNA
ctctcttcttcataatggtt

SEQ ID NO: 4136 - RNA, 20 nt, synthetic construct
  source 1..20: mol_type = other RNA
ctctgttgggggcattttca

SEQ ID NO: 4137 - RNA, 20 nt, synthetic construct
  source 1..20: mol_type = other RNA
ctcttacaacaggggtctat

SEQ ID NO: 4138 - RNA, 20 nt, synthetic construct
  source 1..20: mol_type = other RNA
ctcttcttcataatggtttc

SEQ ID NO: 4139 - RNA, 20 nt, synthetic construct
  source 1..20: mol_type = other RNA
ctgaaattgcttttcacatt

SEQ ID NO: 4140 - RNA, 20 nt, synthetic construct
  source 1..20: mol_type = other RNA
ctggctctgttgggggcatt

SEQ ID NO: 4141 - RNA, 20 nt, synthetic construct
  source 1..20: mol_type = other RNA
ctgtcaaacacaaaaagaaa

SEQ ID NO: 4142 - RNA, 20 nt, synthetic construct
  source 1..20: mol_type = other RNA
ctgttgggggcattttcaca

SEQ ID NO: 4143 - RNA, 20 nt, synthetic construct
  source 1..20: mol_type = other RNA
ctgttgtaagagggcttctt

SEQ ID NO: 4144 - RNA, 20 nt, synthetic construct
  source 1..20: mol_type = other RNA
ctgtttctttttgtgtttga

SEQ ID NO: 4145 - RNA, 20 nt, synthetic construct
  source 1..20: mol_type = other RNA
cttacaacaggggtctatgt

SEQ ID NO: 4146 - RNA, 20 nt, synthetic construct
  source 1..20: mol_type = other RNA
cttattttattcccatcaat

SEQ ID NO: 4147 - RNA, 20 nt, synthetic construct
  source 1..20: mol_type = other RNA
cttcataatggtttctcaat

SEQ ID NO: 4148 - RNA, 20 nt, synthetic construct
  source 1..20: mol_type = other RNA
cttcttcataatggtttctc

SEQ ID NO: 4149 - RNA, 20 nt, synthetic construct
  source 1..20: mol_type = other RNA
cttcttttctttagctgtca

SEQ ID NO: 4150 - RNA, 20 nt, synthetic construct
  source 1..20: mol_type = other RNA
ctttagctgtcaaacacaaa

SEQ ID NO: 4151 - RNA, 20 nt, synthetic construct
  source 1..20: mol_type = other RNA
cttttcacattctggctctg

SEQ ID NO: 4152 - RNA, 20 nt, synthetic construct
  source 1..20: mol_type = other RNA
cttttctttagctgtcaaac

SEQ ID NO: 4153 - RNA, 20 nt, synthetic construct
  source 1..20: mol_type = other RNA
ctttttgtgtttgacagcta

SEQ ID NO: 4154 - RNA, 20 nt, synthetic construct
  source 1..20: mol_type = other RNA
gaaaagaagccctcttacaa

SEQ ID NO: 4155 - RNA, 20 nt, synthetic construct
  source 1..20: mol_type = other RNA
gaaaagcaatttcagcctta

SEQ ID NO: 4156 - RNA, 20 nt, synthetic construct
  source 1..20: mol_type = other RNA
gaaaatgcccccaacagagc

SEQ ID NO: 4157 - RNA, 20 nt, synthetic construct
  source 1..20: mol_type = other RNA
gaaaccattatgaagaagag

SEQ ID NO: 4158 - RNA, 20 nt, synthetic construct
  source 1..20: mol_type = other RNA
gaaatatggactctcttctt

SEQ ID NO: 4159 - RNA, 20 nt, synthetic construct
  source 1..20: mol_type = other RNA
gaaattgaaatatggactct

SEQ ID NO: 4160 - RNA, 20 nt, synthetic construct
  source 1..20: mol_type = other RNA
gaaattgcttttcacattct

SEQ ID NO: 4161 - RNA, 20 nt, synthetic construct
  source 1..20: mol_type = other RNA
gaagccctcttacaacaggg

SEQ ID NO: 4162 - RNA, 20 nt, synthetic construct
  source 1..20: mol_type = other RNA
gaataaaataaggctgaaat

SEQ ID NO: 4163 - RNA, 20 nt, synthetic construct
  source 1..20: mol_type = other RNA
gaatgtgaaaagcaatttca

SEQ ID NO: 4164 - RNA, 20 nt, synthetic construct
  source 1..20: mol_type = other RNA
gacagctaaagaaaagaagc

SEQ ID NO: 4165 - RNA, 20 nt, synthetic construct
  source 1..20: mol_type = other RNA
gacccctgttgtaagagggc

SEQ ID NO: 4166 - RNA, 20 nt, synthetic construct
  source 1..20: mol_type = other RNA
gactctcttcttcataatgg

SEQ ID NO: 4167 - RNA, 20 nt, synthetic construct
  source 1..20: mol_type = other RNA
gagaaaccattatgaagaag

SEQ ID NO: 4168 - RNA, 20 nt, synthetic construct
  source 1..20: mol_type = other RNA
gagccagaatgtgaaaagca

SEQ ID NO: 4169 - RNA, 20 nt, synthetic construct
  source 1..20: mol_type = other RNA
gagggcttcttttctttagc

SEQ ID NO: 4170 - RNA, 20 nt, synthetic construct
  source 1..20: mol_type = other RNA
gatgggaataaaataaggct

SEQ ID NO: 4171 - RNA, 20 nt, synthetic construct
  source 1..20: mol_type = other RNA
gcaatttcagccttatttta

SEQ ID NO: 4172 - RNA, 20 nt, synthetic construct
  source 1..20: mol_type = other RNA
gcattttcacatagacccct

SEQ ID NO: 4173 - RNA, 20 nt, synthetic construct
  source 1..20: mol_type = other RNA
gccagaatgtgaaaagcaat

SEQ ID NO: 4174 - RNA, 20 nt, synthetic construct
  source 1..20: mol_type = other RNA
gcccccaacagagccagaat

SEQ ID NO: 4175 - RNA, 20 nt, synthetic construct
  source 1..20: mol_type = other RNA
gccctcttacaacaggggtc

SEQ ID NO: 4176 - RNA, 20 nt, synthetic construct
  source 1..20: mol_type = other RNA
gccttattttattcccatca

SEQ ID NO: 4177 - RNA, 20 nt, synthetic construct
  source 1..20: mol_type = other RNA
gctaaagaaaagaagccctc

SEQ ID NO: 4178 - RNA, 20 nt, synthetic construct
  source 1..20: mol_type = other RNA
gctctgttgggggcattttc

SEQ ID NO: 4179 - RNA, 20 nt, synthetic construct
  source 1..20: mol_type = other RNA
gctgaaattgcttttcacat

SEQ ID NO: 4180 - RNA, 20 nt, synthetic construct
  source 1..20: mol_type = other RNA
gctgtcaaacacaaaaagaa

SEQ ID NO: 4181 - RNA, 20 nt, synthetic construct
  source 1..20: mol_type = other RNA
gcttcttttctttagctgtc

SEQ ID NO: 4182 - RNA, 20 nt, synthetic construct
  source 1..20: mol_type = other RNA
gcttttcacattctggctct

SEQ ID NO: 4183 - RNA, 20 nt, synthetic construct
  source 1..20: mol_type = other RNA
ggaataaaataaggctgaaa

SEQ ID NO: 4184 - RNA, 20 nt, synthetic construct
  source 1..20: mol_type = other RNA
ggactctcttcttcataatg

SEQ ID NO: 4185 - RNA, 20 nt, synthetic construct
  source 1..20: mol_type = other RNA
ggcattttcacatagacccc

SEQ ID NO: 4186 - RNA, 20 nt, synthetic construct
  source 1..20: mol_type = other RNA
ggctctgttgggggcatttt

SEQ ID NO: 4187 - RNA, 20 nt, synthetic construct
  source 1..20: mol_type = other RNA
ggctgaaattgcttttcaca

SEQ ID NO: 4188 - RNA, 20 nt, synthetic construct
  source 1..20: mol_type = other RNA
ggcttcttttctttagctgt

SEQ ID NO: 4189 - RNA, 20 nt, synthetic construct
  source 1..20: mol_type = other RNA
gggaataaaataaggctgaa

SEQ ID NO: 4190 - RNA, 20 nt, synthetic construct
  source 1..20: mol_type = other RNA
gggcattttcacatagaccc

SEQ ID NO: 4191 - RNA, 20 nt, synthetic construct
  source 1..20: mol_type = other RNA
gggcttcttttctttagctg

SEQ ID NO: 4192 - RNA, 20 nt, synthetic construct
  source 1..20: mol_type = other RNA
ggggcattttcacatagacc

SEQ ID NO: 4193 - RNA, 20 nt, synthetic construct
  source 1..20: mol_type = other RNA
gggggcattttcacatagac

SEQ ID NO: 4194 - RNA, 20 nt, synthetic construct
  source 1..20: mol_type = other RNA
ggggtctatgtgaaaatgcc

SEQ ID NO: 4195 - RNA, 20 nt, synthetic construct
  source 1..20: mol_type = other RNA
gggtctatgtgaaaatgccc

SEQ ID NO: 4196 - RNA, 20 nt, synthetic construct
  source 1..20: mol_type = other RNA
ggtctatgtgaaaatgcccc

SEQ ID NO: 4197 - RNA, 20 nt, synthetic construct
  source 1..20: mol_type = other RNA
ggtttctcaattgatgggaa

SEQ ID NO: 4198 - RNA, 20 nt, synthetic construct
  source 1..20: mol_type = other RNA
gtaagagggcttcttttctt

SEQ ID NO: 4199 - RNA, 20 nt, synthetic construct
  source 1..20: mol_type = other RNA
gtaattactgtttctttttg

SEQ ID NO: 4200 - RNA, 20 nt, synthetic construct
  source 1..20: mol_type = other RNA
gtagtaattactgtttcttt

SEQ ID NO: 4201 - RNA, 20 nt, synthetic construct
  source 1..20: mol_type = other RNA
gtcaaacacaaaaagaaaca

SEQ ID NO: 4202 - RNA, 20 nt, synthetic construct
  source 1..20: mol_type = other RNA
gtctatgtgaaaatgccccc

SEQ ID NO: 4203 - RNA, 20 nt, synthetic construct
  source 1..20: mol_type = other RNA
gtgaaaagcaatttcagcct

SEQ ID NO: 4204 - RNA, 20 nt, synthetic construct
  source 1..20: mol_type = other RNA
gtgaaaatgcccccaacaga

SEQ ID NO: 4205 - RNA, 20 nt, synthetic construct
  source 1..20: mol_type = other RNA
gtgtttgacagctaaagaaa

SEQ ID NO: 4206 - RNA, 20 nt, synthetic construct
  source 1..20: mol_type = other RNA
gttgggggcattttcacata

SEQ ID NO: 4207 - RNA, 20 nt, synthetic construct
  source 1..20: mol_type = other RNA
gttgtaagagggcttctttt

SEQ ID NO: 4208 - RNA, 20 nt, synthetic construct
  source 1..20: mol_type = other RNA
gtttctcaattgatgggaat

SEQ ID NO: 4209 - RNA, 20 nt, synthetic construct
  source 1..20: mol_type = other RNA
gtttctttttgtgtttgaca

SEQ ID NO: 4210 - RNA, 20 nt, synthetic construct
  source 1..20: mol_type = other RNA
gtttgacagctaaagaaaag

SEQ ID NO: 4211 - RNA, 20 nt, synthetic construct
  source 1..20: mol_type = other RNA
taaaataaggctgaaattgc

SEQ ID NO: 4212 - RNA, 20 nt, synthetic construct
  source 1..20: mol_type = other RNA
taaagaaaagaagccctctt

SEQ ID NO: 4213 - RNA, 20 nt, synthetic construct
  source 1..20: mol_type = other RNA
taagagggcttcttttcttt

SEQ ID NO: 4214 - RNA, 20 nt, synthetic construct
  source 1..20: mol_type = other RNA
taaggctgaaattgcttttc

SEQ ID NO: 4215 - RNA, 20 nt, synthetic construct
  source 1..20: mol_type = other RNA
taatggtttctcaattgatg

SEQ ID NO: 4216 - RNA, 20 nt, synthetic construct
  source 1..20: mol_type = other RNA
tacaacaggggtctatgtga

SEQ ID NO: 4217 - RNA, 20 nt, synthetic construct
  source 1..20: mol_type = other RNA
tactgtttctttttgtgttt

SEQ ID NO: 4218 - RNA, 20 nt, synthetic construct
  source 1..20: mol_type = other RNA
tagacccctgttgtaagagg

SEQ ID NO: 4219 - RNA, 20 nt, synthetic construct
  source 1..20: mol_type = other RNA
tagctgtcaaacacaaaaag

SEQ ID NO: 4220 - RNA, 20 nt, synthetic construct
  source 1..20: mol_type = other RNA
tatgaagaagagagtccata

SEQ ID NO: 4221 - RNA, 20 nt, synthetic construct
  source 1..20: mol_type = other RNA
tatggactctcttcttcata

SEQ ID NO: 4222 - RNA, 20 nt, synthetic construct
  source 1..20: mol_type = other RNA
tatgtgaaaatgcccccaac

SEQ ID NO: 4223 - RNA, 20 nt, synthetic construct
  source 1..20: mol_type = other RNA
tattcccatcaattgagaaa

SEQ ID NO: 4224 - RNA, 20 nt, synthetic construct
  source 1..20: mol_type = other RNA
tattttattcccatcaattg

SEQ ID NO: 4225 - RNA, 20 nt, synthetic construct
  source 1..20: mol_type = other RNA
tcaaacacaaaaagaaacag

SEQ ID NO: 4226 - RNA, 20 nt, synthetic construct
  source 1..20: mol_type = other RNA
tcaattgagaaaccattatg

SEQ ID NO: 4227 - RNA, 20 nt, synthetic construct
  source 1..20: mol_type = other RNA
tcaattgatgggaataaaat

SEQ ID NO: 4228 - RNA, 20 nt, synthetic construct
  source 1..20: mol_type = other RNA
tcacatagacccctgttgta

SEQ ID NO: 4229 - RNA, 20 nt, synthetic construct
  source 1..20: mol_type = other RNA
tcacattctggctctgttgg

SEQ ID NO: 4230 - RNA, 20 nt, synthetic construct
  source 1..20: mol_type = other RNA
tcagccttattttattccca

SEQ ID NO: 4231 - RNA, 20 nt, synthetic construct
  source 1..20: mol_type = other RNA
tcagtagtaattactgtttc

SEQ ID NO: 4232 - RNA, 20 nt, synthetic construct
  source 1..20: mol_type = other RNA
tcataatggtttctcaattg

SEQ ID NO: 4233 - RNA, 20 nt, synthetic construct
  source 1..20: mol_type = other RNA
tcccatcaattgagaaacca

SEQ ID NO: 4234 - RNA, 20 nt, synthetic construct
  source 1..20: mol_type = other RNA
tcctcagtagtaattactgt

SEQ ID NO: 4235 - RNA, 20 nt, synthetic construct
  source 1..20: mol_type = other RNA
tctatgtgaaaatgccccca

SEQ ID NO: 4236 - RNA, 20 nt, synthetic construct
  source 1..20: mol_type = other RNA
tctcaattgatgggaataaa

SEQ ID NO: 4237 - RNA, 20 nt, synthetic construct
  source 1..20: mol_type = other RNA
tctcttcttcataatggttt

SEQ ID NO: 4238 - RNA, 20 nt, synthetic construct
  source 1..20: mol_type = other RNA
tctggctctgttgggggcat

SEQ ID NO: 4239 - RNA, 20 nt, synthetic construct
  source 1..20: mol_type = other RNA
tctgttgggggcattttcac

SEQ ID NO: 4240 - RNA, 20 nt, synthetic construct
  source 1..20: mol_type = other RNA
tcttacaacaggggtctatg

SEQ ID NO: 4241 - RNA, 20 nt, synthetic construct
  source 1..20: mol_type = other RNA
tcttcataatggtttctcaa

SEQ ID NO: 4242 - RNA, 20 nt, synthetic construct
  source 1..20: mol_type = other RNA
tcttcttcataatggtttct

SEQ ID NO: 4243 - RNA, 20 nt, synthetic construct
  source 1..20: mol_type = other RNA
tctttagctgtcaaacacaa

SEQ ID NO: 4244 - RNA, 20 nt, synthetic construct
  source 1..20: mol_type = other RNA
tcttttctttagctgtcaaa

SEQ ID NO: 4245 - RNA, 20 nt, synthetic construct
  source 1..20: mol_type = other RNA
tctttttgtgtttgacagct

SEQ ID NO: 4246 - RNA, 20 nt, synthetic construct
  source 1..20: mol_type = other RNA
tgaaaagcaatttcagcctt

SEQ ID NO: 4247 - RNA, 20 nt, synthetic construct
  source 1..20: mol_type = other RNA
tgaaaatgcccccaacagag

SEQ ID NO: 4248 - RNA, 20 nt, synthetic construct
  source 1..20: mol_type = other RNA
tgaaatatggactctcttct

SEQ ID NO: 4249 - RNA, 20 nt, synthetic construct
  source 1..20: mol_type = other RNA
tgaaattgcttttcacattc

SEQ ID NO: 4250 - RNA, 20 nt, synthetic construct
  source 1..20: mol_type = other RNA
tgaagaagagagtccatatt

SEQ ID NO: 4251 - RNA, 20 nt, synthetic construct
  source 1..20: mol_type = other RNA
tgacagctaaagaaaagaag

SEQ ID NO: 4252 - RNA, 20 nt, synthetic construct
  source 1..20: mol_type = other RNA
tgagaaaccattatgaagaa

SEQ ID NO: 4253 - RNA, 20 nt, synthetic construct
  source 1..20: mol_type = other RNA
tgatgggaataaaataaggc

SEQ ID NO: 4254 - RNA, 20 nt, synthetic construct
  source 1..20: mol_type = other RNA
tgcccccaacagagccagaa

SEQ ID NO: 4255 - RNA, 20 nt, synthetic construct
  source 1..20: mol_type = other RNA
tgcttttcacattctggctc

SEQ ID NO: 4256 - RNA, 20 nt, synthetic construct
  source 1..20: mol_type = other RNA
tggactctcttcttcataat

SEQ ID NO: 4257 - RNA, 20 nt, synthetic construct
  source 1..20: mol_type = other RNA
tggctctgttgggggcattt

SEQ ID NO: 4258 - RNA, 20 nt, synthetic construct
  source 1..20: mol_type = other RNA
tgggaataaaataaggctga

SEQ ID NO: 4259 - RNA, 20 nt, synthetic construct
  source 1..20: mol_type = other RNA
tgggggcattttcacataga

SEQ ID NO: 4260 - RNA, 20 nt, synthetic construct
  source 1..20: mol_type = other RNA
tggtttctcaattgatggga

SEQ ID NO: 4261 - RNA, 20 nt, synthetic construct
  source 1..20: mol_type = other RNA
tgtaagagggcttcttttct

SEQ ID NO: 4262 - RNA, 20 nt, synthetic construct
  source 1..20: mol_type = other RNA
tgtcaaacacaaaaagaaac

SEQ ID NO: 4263 - RNA, 20 nt, synthetic construct
  source 1..20: mol_type = other RNA
tgtgaaaagcaatttcagcc

SEQ ID NO: 4264 - RNA, 20 nt, synthetic construct
  source 1..20: mol_type = other RNA
tgtgaaaatgcccccaacag

SEQ ID NO: 4265 - RNA, 20 nt, synthetic construct
  source 1..20: mol_type = other RNA
tgtgtttgacagctaaagaa

SEQ ID NO: 4266 - RNA, 20 nt, synthetic construct
  source 1..20: mol_type = other RNA
tgttgggggcattttcacat

SEQ ID NO: 4267 - RNA, 20 nt, synthetic construct
  source 1..20: mol_type = other RNA
tgttgtaagagggcttcttt

SEQ ID NO: 4268 - RNA, 20 nt, synthetic construct
  source 1..20: mol_type = other RNA
tgtttctttttgtgtttgac

SEQ ID NO: 4269 - RNA, 20 nt, synthetic construct
  source 1..20: mol_type = other RNA
tgtttgacagctaaagaaaa

SEQ ID NO: 4270 - RNA, 20 nt, synthetic construct
  source 1..20: mol_type = other RNA
ttacaacaggggtctatgtg

SEQ ID NO: 4271 - RNA, 20 nt, synthetic construct
  source 1..20: mol_type = other RNA
ttactgtttctttttgtgtt

SEQ ID NO: 4272 - RNA, 20 nt, synthetic construct
  source 1..20: mol_type = other RNA
ttagctgtcaaacacaaaaa

SEQ ID NO: 4273 - RNA, 20 nt, synthetic construct
  source 1..20: mol_type = other RNA
ttatgaagaagagagtccat

SEQ ID NO: 4274 - RNA, 20 nt, synthetic construct
  source 1..20: mol_type = other RNA
ttattcccatcaattgagaa

SEQ ID NO: 4275 - RNA, 20 nt, synthetic construct
  source 1..20: mol_type = other RNA
ttcacatagacccctgttgt

SEQ ID NO: 4276 - RNA, 20 nt, synthetic construct
  source 1..20: mol_type = other RNA
ttcacattctggctctgttg

SEQ ID NO: 4277 - RNA, 20 nt, synthetic construct
  source 1..20: mol_type = other RNA
ttcagccttattttattccc

SEQ ID NO: 4278 - RNA, 20 nt, synthetic construct
  source 1..20: mol_type = other RNA
ttcataatggtttctcaatt

SEQ ID NO: 4279 - RNA, 20 nt, synthetic construct
  source 1..20: mol_type = other RNA
ttcccatcaattgagaaacc

SEQ ID NO: 4280 - RNA, 20 nt, synthetic construct
  source 1..20: mol_type = other RNA
ttctcaattgatgggaataa

SEQ ID NO: 4281 - RNA, 20 nt, synthetic construct
  source 1..20: mol_type = other RNA
ttctggctctgttgggggca

SEQ ID NO: 4282 - RNA, 20 nt, synthetic construct
  source 1..20: mol_type = other RNA
ttcttcataatggtttctca

SEQ ID NO: 4283 - RNA, 20 nt, synthetic construct
  source 1..20: mol_type = other RNA
ttctttagctgtcaaacaca

SEQ ID NO: 4284 - RNA, 20 nt, synthetic construct
  source 1..20: mol_type = other RNA
ttcttttctttagctgtcaa

SEQ ID NO: 4285 - RNA, 20 nt, synthetic construct
  source 1..20: mol_type = other RNA
ttctttttgtgtttgacagc

SEQ ID NO: 4286 - RNA, 20 nt, synthetic construct
  source 1..20: mol_type = other RNA
ttgaaatatggactctcttc

SEQ ID NO: 4287 - RNA, 20 nt, synthetic construct
  source 1..20: mol_type = other RNA
ttgacagctaaagaaaagaa

SEQ ID NO: 4288 - RNA, 20 nt, synthetic construct
  source 1..20: mol_type = other RNA
ttgagaaaccattatgaaga

SEQ ID NO: 4289 - RNA, 20 nt, synthetic construct
  source 1..20: mol_type = other RNA
ttgatgggaataaaataagg

SEQ ID NO: 4290 - RNA, 20 nt, synthetic construct
  source 1..20: mol_type = other RNA
ttgcttttcacattctggct

SEQ ID NO: 4291 - RNA, 20 nt, synthetic construct
  source 1..20: mol_type = other RNA
ttgggggcattttcacatag

SEQ ID NO: 4292 - RNA, 20 nt, synthetic construct
  source 1..20: mol_type = other RNA
ttgtaagagggcttcttttc

SEQ ID NO: 4293 - RNA, 20 nt, synthetic construct
  source 1..20: mol_type = other RNA
ttgtgtttgacagctaaaga

SEQ ID NO: 4294 - RNA, 20 nt, synthetic construct
  source 1..20: mol_type = other RNA
tttagctgtcaaacacaaaa

SEQ ID NO: 4295 - RNA, 20 nt, synthetic construct
  source 1..20: mol_type = other RNA
tttattcccatcaattgaga

SEQ ID NO: 4296 - RNA, 20 nt, synthetic construct
  source 1..20: mol_type = other RNA
tttcacatagacccctgttg

SEQ ID NO: 4297 - RNA, 20 nt, synthetic construct
  source 1..20: mol_type = other RNA
tttcacattctggctctgtt

SEQ ID NO: 4298 - RNA, 20 nt, synthetic construct
  source 1..20: mol_type = other RNA
tttcagccttattttattcc

SEQ ID NO: 4299 - RNA, 20 nt, synthetic construct
  source 1..20: mol_type = other RNA
tttctcaattgatgggaata

SEQ ID NO: 4300 - RNA, 20 nt, synthetic construct
  source 1..20: mol_type = other RNA
tttctttagctgtcaaacac

SEQ ID NO: 4301 - RNA, 20 nt, synthetic construct
  source 1..20: mol_type = other RNA
tttctttttgtgtttgacag

SEQ ID NO: 4302 - RNA, 20 nt, synthetic construct
  source 1..20: mol_type = other RNA
tttgacagctaaagaaaaga

SEQ ID NO: 4303 - RNA, 20 nt, synthetic construct
  source 1..20: mol_type = other RNA
tttgtgtttgacagctaaag

SEQ ID NO: 4304 - RNA, 20 nt, synthetic construct
  source 1..20: mol_type = other RNA
ttttattcccatcaattgag

SEQ ID NO: 4305 - RNA, 20 nt, synthetic construct
  source 1..20: mol_type = other RNA
ttttcacatagacccctgtt

SEQ ID NO: 4306 - RNA, 20 nt, synthetic construct
  source 1..20: mol_type = other RNA
ttttcacattctggctctgt

SEQ ID NO: 4307 - RNA, 20 nt, synthetic construct
  source 1..20: mol_type = other RNA
ttttctttagctgtcaaaca

SEQ ID NO: 4308 - RNA, 20 nt, synthetic construct
  source 1..20: mol_type = other RNA
ttttgtgtttgacagctaaa

SEQ ID NO: 4309 - RNA, 20 nt, synthetic construct
  source 1..20: mol_type = other RNA
tttttgtgtttgacagctaa

SEQ ID NO: 4310 - RNA, 21 nt, synthetic construct
  source 1..21: mol_type = other RNA
aaaagaagccctcttacaaca

SEQ ID NO: 4311 - RNA, 21 nt, synthetic construct
  source 1..21: mol_type = other RNA
aaaagcaatttcagccttatt

SEQ ID NO: 4312 - RNA, 21 nt, synthetic construct
  source 1..21: mol_type = other RNA
aaaataaggctgaaattgctt

SEQ ID NO: 4313 - RNA, 21 nt, synthetic construct
  source 1..21: mol_type = other RNA
aaaatgcccccaacagagcca

SEQ ID NO: 4314 - RNA, 21 nt, synthetic construct
  source 1..21: mol_type = other RNA
aaaccattatgaagaagagag

SEQ ID NO: 4315 - RNA, 21 nt, synthetic construct
  source 1..21: mol_type = other RNA
aaagaaaagaagccctcttac

SEQ ID NO: 4316 - RNA, 21 nt, synthetic construct
  source 1..21: mol_type = other RNA
aaagaagccctcttacaacag

SEQ ID NO: 4317 - RNA, 21 nt, synthetic construct
  source 1..21: mol_type = other RNA
aaagcaatttcagccttattt

SEQ ID NO: 4318 - RNA, 21 nt, synthetic construct
  source 1..21: mol_type = other RNA
aaataaggctgaaattgcttt

SEQ ID NO: 4319 - RNA, 21 nt, synthetic construct
  source 1..21: mol_type = other RNA
aaatatggactctcttcttca

SEQ ID NO: 4320 - RNA, 21 nt, synthetic construct
  source 1..21: mol_type = other RNA
aaatgcccccaacagagccag

SEQ ID NO: 4321 - RNA, 21 nt, synthetic construct
  source 1..21: mol_type = other RNA
aaattgaaatatggactctct

SEQ ID NO: 4322 - RNA, 21 nt, synthetic construct
  source 1..21: mol_type = other RNA
aaattgcttttcacattctgg

SEQ ID NO: 4323 - RNA, 21 nt, synthetic construct
  source 1..21: mol_type = other RNA
aacagagccagaatgtgaaaa

SEQ ID NO: 4324 - RNA, 21 nt, synthetic construct
  source 1..21: mol_type = other RNA
aacaggggtctatgtgaaaat

SEQ ID NO: 4325 - RNA, 21 nt, synthetic construct
  source 1..21: mol_type = other RNA
aaccattatgaagaagagagt

SEQ ID NO: 4326 - RNA, 21 nt, synthetic construct
  source 1..21: mol_type = other RNA
aagaaaagaagccctcttaca

SEQ ID NO: 4327 - RNA, 21 nt, synthetic construct
  source 1..21: mol_type = other RNA
aagaagccctcttacaacagg

SEQ ID NO: 4328 - RNA, 21 nt, synthetic construct
  source 1..21: mol_type = other RNA
aagagggcttcttttctttag

SEQ ID NO: 4329 - RNA, 21 nt, synthetic construct
  source 1..21: mol_type = other RNA
aagcaatttcagccttatttt

SEQ ID NO: 4330 - RNA, 21 nt, synthetic construct
  source 1..21: mol_type = other RNA
aagccctcttacaacaggggt

SEQ ID NO: 4331 - RNA, 21 nt, synthetic construct
  source 1..21: mol_type = other RNA
aaggctgaaattgcttttcac

SEQ ID NO: 4332 - RNA, 21 nt, synthetic construct
  source 1..21: mol_type = other RNA
aataaggctgaaattgctttt

SEQ ID NO: 4333 - RNA, 21 nt, synthetic construct
  source 1..21: mol_type = other RNA
aatatggactctcttcttcat

SEQ ID NO: 4334 - RNA, 21 nt, synthetic construct
  source 1..21: mol_type = other RNA
aatgcccccaacagagccaga

SEQ ID NO: 4335 - RNA, 21 nt, synthetic construct
  source 1..21: mol_type = other RNA
aatggtttctcaattgatggg

SEQ ID NO: 4336 - RNA, 21 nt, synthetic construct
  source 1..21: mol_type = other RNA
aatgtgaaaagcaatttcagc

SEQ ID NO: 4337 - RNA, 21 nt, synthetic construct
  source 1..21: mol_type = other RNA
aattgaaatatggactctctt

SEQ ID NO: 4338 - RNA, 21 nt, synthetic construct
  source 1..21: mol_type = other RNA
aattgagaaaccattatgaag

SEQ ID NO: 4339 - RNA, 21 nt, synthetic construct
  source 1..21: mol_type = other RNA
aattgcttttcacattctggc

SEQ ID NO: 4340 - RNA, 21 nt, synthetic construct
  source 1..21: mol_type = other RNA
acaacaggggtctatgtgaaa

SEQ ID NO: 4341 - RNA, 21 nt, synthetic construct
  source 1..21: mol_type = other RNA
acagagccagaatgtgaaaag

SEQ ID NO: 4342 - RNA, 21 nt, synthetic construct
  source 1..21: mol_type = other RNA
acagctaaagaaaagaagccc

SEQ ID NO: 4343 - RNA, 21 nt, synthetic construct
  source 1..21: mol_type = other RNA
acaggggtctatgtgaaaatg

SEQ ID NO: 4344 - RNA, 21 nt, synthetic construct
  source 1..21: mol_type = other RNA
acatagacccctgttgtaaga

SEQ ID NO: 4345 - RNA, 21 nt, synthetic construct
  source 1..21: mol_type = other RNA
acattctggctctgttggggg

SEQ ID NO: 4346 - RNA, 21 nt, synthetic construct
  source 1..21: mol_type = other RNA
accattatgaagaagagagtc

SEQ ID NO: 4347 - RNA, 21 nt, synthetic construct
  source 1..21: mol_type = other RNA
acccctgttgtaagagggctt

SEQ ID NO: 4348 - RNA, 21 nt, synthetic construct
  source 1..21: mol_type = other RNA
actctcttcttcataatggtt

SEQ ID NO: 4349 - RNA, 21 nt, synthetic construct
  source 1..21: mol_type = other RNA
actgtttctttttgtgtttga

SEQ ID NO: 4350 - RNA, 21 nt, synthetic construct
  source 1..21: mol_type = other RNA
agaaaagaagccctcttacaa

SEQ ID NO: 4351 - RNA, 21 nt, synthetic construct
  source 1..21: mol_type = other RNA
agaaaccattatgaagaagag

SEQ ID NO: 4352 - RNA, 21 nt, synthetic construct
  source 1..21: mol_type = other RNA
agaagccctcttacaacaggg

SEQ ID NO: 4353 - RNA, 21 nt, synthetic construct
  source 1..21: mol_type = other RNA
agaatgtgaaaagcaatttca

SEQ ID NO: 4354 - RNA, 21 nt, synthetic construct
  source 1..21: mol_type = other RNA
agacccctgttgtaagagggc

SEQ ID NO: 4355 - RNA, 21 nt, synthetic construct
  source 1..21: mol_type = other RNA
agagccagaatgtgaaaagca

SEQ ID NO: 4356 - RNA, 21 nt, synthetic construct
  source 1..21: mol_type = other RNA
agagggcttcttttctttagc

SEQ ID NO: 4357 - RNA, 21 nt, synthetic construct
  source 1..21: mol_type = other RNA
agcaatttcagccttatttta

SEQ ID NO: 4358 - RNA, 21 nt, synthetic construct
  source 1..21: mol_type = other RNA
agccagaatgtgaaaagcaat

SEQ ID NO: 4359 - RNA, 21 nt, synthetic construct
  source 1..21: mol_type = other RNA
agccctcttacaacaggggtc

SEQ ID NO: 4360 - RNA, 21 nt, synthetic construct
  source 1..21: mol_type = other RNA
agccttattttattcccatca

SEQ ID NO: 4361 - RNA, 21 nt, synthetic construct
  source 1..21: mol_type = other RNA
agctaaagaaaagaagccctc

SEQ ID NO: 4362 - RNA, 21 nt, synthetic construct
  source 1..21: mol_type = other RNA
agctgtcaaacacaaaaagaa

SEQ ID NO: 4363 - RNA, 21 nt, synthetic construct
  source 1..21: mol_type = other RNA
aggctgaaattgcttttcaca

SEQ ID NO: 4364 - RNA, 21 nt, synthetic construct
  source 1..21: mol_type = other RNA
agggcttcttttctttagctg

SEQ ID NO: 4365 - RNA, 21 nt, synthetic construct
  source 1..21: mol_type = other RNA
aggggtctatgtgaaaatgcc

SEQ ID NO: 4366 - RNA, 21 nt, synthetic construct
  source 1..21: mol_type = other RNA
ataaaataaggctgaaattgc

SEQ ID NO: 4367 - RNA, 21 nt, synthetic construct
  source 1..21: mol_type = other RNA
ataaggctgaaattgcttttc

SEQ ID NO: 4368 - RNA, 21 nt, synthetic construct
  source 1..21: mol_type = other RNA
ataatggtttctcaattgatg

SEQ ID NO: 4369 - RNA, 21 nt, synthetic construct
  source 1..21: mol_type = other RNA
atagacccctgttgtaagagg

SEQ ID NO: 4370 - RNA, 21 nt, synthetic construct
  source 1..21: mol_type = other RNA
atatggactctcttcttcata

SEQ ID NO: 4371 - RNA, 21 nt, synthetic construct
  source 1..21: mol_type = other RNA
atcaattgagaaaccattatg

SEQ ID NO: 4372 - RNA, 21 nt, synthetic construct
  source 1..21: mol_type = other RNA
atgaagaagagagtccatatt

SEQ ID NO: 4373 - RNA, 21 nt, synthetic construct
  source 1..21: mol_type = other RNA
atgcccccaacagagccagaa

SEQ ID NO: 4374 - RNA, 21 nt, synthetic construct
  source 1..21: mol_type = other RNA
atggactctcttcttcataat

SEQ ID NO: 4375 - RNA, 21 nt, synthetic construct
  source 1..21: mol_type = other RNA
atgggaataaaataaggctga

SEQ ID NO: 4376 - RNA, 21 nt, synthetic construct
  source 1..21: mol_type = other RNA
atggtttctcaattgatggga

SEQ ID NO: 4377 - RNA, 21 nt, synthetic construct
  source 1..21: mol_type = other RNA
atgtgaaaagcaatttcagcc

SEQ ID NO: 4378 - RNA, 21 nt, synthetic construct
  source 1..21: mol_type = other RNA
atgtgaaaatgcccccaacag

SEQ ID NO: 4379 - RNA, 21 nt, synthetic construct
  source 1..21: mol_type = other RNA
attatgaagaagagagtccat

SEQ ID NO: 4380 - RNA, 21 nt, synthetic construct
  source 1..21: mol_type = other RNA
attcccatcaattgagaaacc

SEQ ID NO: 4381 - RNA, 21 nt, synthetic construct
  source 1..21: mol_type = other RNA
attctggctctgttgggggca

SEQ ID NO: 4382 - RNA, 21 nt, synthetic construct
  source 1..21: mol_type = other RNA
attgaaatatggactctcttc

SEQ ID NO: 4383 - RNA, 21 nt, synthetic construct
  source 1..21: mol_type = other RNA
attgagaaaccattatgaaga

SEQ ID NO: 4384 - RNA, 21 nt, synthetic construct
  source 1..21: mol_type = other RNA
attgatgggaataaaataagg

SEQ ID NO: 4385 - RNA, 21 nt, synthetic construct
  source 1..21: mol_type = other RNA
attgcttttcacattctggct

SEQ ID NO: 4386 - RNA, 21 nt, synthetic construct
  source 1..21: mol_type = other RNA
atttcagccttattttattcc

SEQ ID NO: 4387 - RNA, 21 nt, synthetic construct
  source 1..21: mol_type = other RNA
attttattcccatcaattgag

SEQ ID NO: 4388 - RNA, 21 nt, synthetic construct
  source 1..21: mol_type = other RNA
attttcacatagacccctgtt

SEQ ID NO: 4389 - RNA, 21 nt, synthetic construct
  source 1..21: mol_type = other RNA
caaacacaaaaagaaacagta

SEQ ID NO: 4390 - RNA, 21 nt, synthetic construct
  source 1..21: mol_type = other RNA
caacagagccagaatgtgaaa

SEQ ID NO: 4391 - RNA, 21 nt, synthetic construct
  source 1..21: mol_type = other RNA
caacaggggtctatgtgaaaa

SEQ ID NO: 4392 - RNA, 21 nt, synthetic construct
  source 1..21: mol_type = other RNA
caattgagaaaccattatgaa

SEQ ID NO: 4393 - RNA, 21 nt, synthetic construct
  source 1..21: mol_type = other RNA
cacatagacccctgttgtaag

SEQ ID NO: 4394 - RNA, 21 nt, synthetic construct
  source 1..21: mol_type = other RNA
cacattctggctctgttgggg

SEQ ID NO: 4395 - RNA, 21 nt, synthetic construct
  source 1..21: mol_type = other RNA
cagaatgtgaaaagcaatttc

SEQ ID NO: 4396 - RNA, 21 nt, synthetic construct
  source 1..21: mol_type = other RNA
cagagccagaatgtgaaaagc

SEQ ID NO: 4397 - RNA, 21 nt, synthetic construct
  source 1..21: mol_type = other RNA
cagccttattttattcccatc

SEQ ID NO: 4398 - RNA, 21 nt, synthetic construct
  source 1..21: mol_type = other RNA
cagctaaagaaaagaagccct

SEQ ID NO: 4399 - RNA, 21 nt, synthetic construct
  source 1..21: mol_type = other RNA
caggggtctatgtgaaaatgc

SEQ ID NO: 4400 - RNA, 21 nt, synthetic construct
  source 1..21: mol_type = other RNA
cagtagtaattactgtttctt

SEQ ID NO: 4401 - RNA, 21 nt, synthetic construct
  source 1..21: mol_type = other RNA
cataatggtttctcaattgat

SEQ ID NO: 4402 - RNA, 21 nt, synthetic construct
  source 1..21: mol_type = other RNA
catagacccctgttgtaagag

SEQ ID NO: 4403 - RNA, 21 nt, synthetic construct
  source 1..21: mol_type = other RNA
catcaattgagaaaccattat

SEQ ID NO: 4404 - RNA, 21 nt, synthetic construct
  source 1..21: mol_type = other RNA
cattatgaagaagagagtcca

SEQ ID NO: 4405 - RNA, 21 nt, synthetic construct
  source 1..21: mol_type = other RNA
cattctggctctgttgggggc

SEQ ID NO: 4406 - RNA, 21 nt, synthetic construct
  source 1..21: mol_type = other RNA
cattttcacatagacccctgt

SEQ ID NO: 4407 - RNA, 21 nt, synthetic construct
  source 1..21: mol_type = other RNA
ccaacagagccagaatgtgaa

SEQ ID NO: 4408 - RNA, 21 nt, synthetic construct
  source 1..21: mol_type = other RNA
ccagaatgtgaaaagcaattt

SEQ ID NO: 4409 - RNA, 21 nt, synthetic construct
  source 1..21: mol_type = other RNA
ccatcaattgagaaaccatta

SEQ ID NO: 4410 - RNA, 21 nt, synthetic construct
  source 1..21: mol_type = other RNA
ccattatgaagaagagagtcc

SEQ ID NO: 4411 - RNA, 21 nt, synthetic construct
  source 1..21: mol_type = other RNA
cccaacagagccagaatgtga

SEQ ID NO: 4412 - RNA, 21 nt, synthetic construct
  source 1..21: mol_type = other RNA
cccatcaattgagaaaccatt

SEQ ID NO: 4413 - RNA, 21 nt, synthetic construct
  source 1..21: mol_type = other RNA
ccccaacagagccagaatgtg

SEQ ID NO: 4414 - RNA, 21 nt, synthetic construct
  source 1..21: mol_type = other RNA
cccccaacagagccagaatgt

SEQ ID NO: 4415 - RNA, 21 nt, synthetic construct
  source 1..21: mol_type = other RNA
cccctgttgtaagagggcttc

SEQ ID NO: 4416 - RNA, 21 nt, synthetic construct
  source 1..21: mol_type = other RNA
ccctcttacaacaggggtcta

SEQ ID NO: 4417 - RNA, 21 nt, synthetic construct
  source 1..21: mol_type = other RNA
ccctgttgtaagagggcttct

SEQ ID NO: 4418 - RNA, 21 nt, synthetic construct
  source 1..21: mol_type = other RNA
cctcagtagtaattactgttt

SEQ ID NO: 4419 - RNA, 21 nt, synthetic construct
  source 1..21: mol_type = other RNA
cctcttacaacaggggtctat

SEQ ID NO: 4420 - RNA, 21 nt, synthetic construct
  source 1..21: mol_type = other RNA
cctgttgtaagagggcttctt

SEQ ID NO: 4421 - RNA, 21 nt, synthetic construct
  source 1..21: mol_type = other RNA
ccttattttattcccatcaat

SEQ ID NO: 4422 - RNA, 21 nt, synthetic construct
  source 1..21: mol_type = other RNA
ctaaagaaaagaagccctctt

SEQ ID NO: 4423 - RNA, 21 nt, synthetic construct
  source 1..21: mol_type = other RNA
ctatgtgaaaatgcccccaac

SEQ ID NO: 4424 - RNA, 21 nt, synthetic construct
  source 1..21: mol_type = other RNA
ctcaattgatgggaataaaat

SEQ ID NO: 4425 - RNA, 21 nt, synthetic construct
  source 1..21: mol_type = other RNA
ctcagtagtaattactgtttc

SEQ ID NO: 4426 - RNA, 21 nt, synthetic construct
  source 1..21: mol_type = other RNA
ctctcttcttcataatggttt

SEQ ID NO: 4427 - RNA, 21 nt, synthetic construct
  source 1..21: mol_type = other RNA
ctctgttgggggcattttcac

SEQ ID NO: 4428 - RNA, 21 nt, synthetic construct
  source 1..21: mol_type = other RNA
ctcttacaacaggggtctatg

SEQ ID NO: 4429 - RNA, 21 nt, synthetic construct
  source 1..21: mol_type = other RNA
ctcttcttcataatggtttct

SEQ ID NO: 4430 - RNA, 21 nt, synthetic construct
  source 1..21: mol_type = other RNA
ctgaaattgcttttcacattc

SEQ ID NO: 4431 - RNA, 21 nt, synthetic construct
  source 1..21: mol_type = other RNA
ctggctctgttgggggcattt

SEQ ID NO: 4432 - RNA, 21 nt, synthetic construct
  source 1..21: mol_type = other RNA
ctgtcaaacacaaaaagaaac

SEQ ID NO: 4433 - RNA, 21 nt, synthetic construct
  source 1..21: mol_type = other RNA
ctgttgggggcattttcacat

SEQ ID NO: 4434 - RNA, 21 nt, synthetic construct
  source 1..21: mol_type = other RNA
ctgttgtaagagggcttcttt

SEQ ID NO: 4435 - RNA, 21 nt, synthetic construct
  source 1..21: mol_type = other RNA
ctgtttctttttgtgtttgac

SEQ ID NO: 4436 - RNA, 21 nt, synthetic construct
  source 1..21: mol_type = other RNA
cttacaacaggggtctatgtg

SEQ ID NO: 4437 - RNA, 21 nt, synthetic construct
  source 1..21: mol_type = other RNA
cttcataatggtttctcaatt

SEQ ID NO: 4438 - RNA, 21 nt, synthetic construct
  source 1..21: mol_type = other RNA
cttcttcataatggtttctca

SEQ ID NO: 4439 - RNA, 21 nt, synthetic construct
  source 1..21: mol_type = other RNA
cttcttttctttagctgtcaa

SEQ ID NO: 4440 - RNA, 21 nt, synthetic construct
  source 1..21: mol_type = other RNA
ctttagctgtcaaacacaaaa

SEQ ID NO: 4441 - RNA, 21 nt, synthetic construct
  source 1..21: mol_type = other RNA
cttttcacattctggctctgt

SEQ ID NO: 4442 - RNA, 21 nt, synthetic construct
  source 1..21: mol_type = other RNA
cttttctttagctgtcaaaca

SEQ ID NO: 4443 - RNA, 21 nt, synthetic construct
  source 1..21: mol_type = other RNA
ctttttgtgtttgacagctaa

SEQ ID NO: 4444 - RNA, 21 nt, synthetic construct
  source 1..21: mol_type = other RNA
gaaaagaagccctcttacaac

SEQ ID NO: 4445 - RNA, 21 nt, synthetic construct
  source 1..21: mol_type = other RNA
gaaaagcaatttcagccttat

SEQ ID NO: 4446 - RNA, 21 nt, synthetic construct
  source 1..21: mol_type = other RNA
gaaaatgcccccaacagagcc

SEQ ID NO: 4447 - RNA, 21 nt, synthetic construct
  source 1..21: mol_type = other RNA
gaaaccattatgaagaagaga

SEQ ID NO: 4448 - RNA, 21 nt, synthetic construct
  source 1..21: mol_type = other RNA
gaaatatggactctcttcttc

SEQ ID NO: 4449 - RNA, 21 nt, synthetic construct
  source 1..21: mol_type = other RNA
gaaattgaaatatggactctc

SEQ ID NO: 4450 - RNA, 21 nt, synthetic construct
  source 1..21: mol_type = other RNA
gaaattgcttttcacattctg

SEQ ID NO: 4451 - RNA, 21 nt, synthetic construct
  source 1..21: mol_type = other RNA
gaagccctcttacaacagggg

SEQ ID NO: 4452 - RNA, 21 nt, synthetic construct
  source 1..21: mol_type = other RNA
gaatgtgaaaagcaatttcag

SEQ ID NO: 4453 - RNA, 21 nt, synthetic construct
  source 1..21: mol_type = other RNA
gacagctaaagaaaagaagcc

SEQ ID NO: 4454 - RNA, 21 nt, synthetic construct
  source 1..21: mol_type = other RNA
gacccctgttgtaagagggct

SEQ ID NO: 4455 - RNA, 21 nt, synthetic construct
  source 1..21: mol_type = other RNA
gactctcttcttcataatggt

SEQ ID NO: 4456 - RNA, 21 nt, synthetic construct
  source 1..21: mol_type = other RNA
gagaaaccattatgaagaaga

SEQ ID NO: 4457 - RNA, 21 nt, synthetic construct
  source 1..21: mol_type = other RNA
gagccagaatgtgaaaagcaa

SEQ ID NO: 4458 - RNA, 21 nt, synthetic construct
  source 1..21: mol_type = other RNA
gagggcttcttttctttagct

SEQ ID NO: 4459 - RNA, 21 nt, synthetic construct
  source 1..21: mol_type = other RNA
gatgggaataaaataaggctg

SEQ ID NO: 4460 - RNA, 21 nt, synthetic construct
  source 1..21: mol_type = other RNA
gcaatttcagccttattttat

SEQ ID NO: 4461 - RNA, 21 nt, synthetic construct
  source 1..21: mol_type = other RNA
gcattttcacatagacccctg

SEQ ID NO: 4462 - RNA, 21 nt, synthetic construct
  source 1..21: mol_type = other RNA
gccagaatgtgaaaagcaatt

SEQ ID NO: 4463 - RNA, 21 nt, synthetic construct
  source 1..21: mol_type = other RNA
gcccccaacagagccagaatg

SEQ ID NO: 4464 - RNA, 21 nt, synthetic construct
  source 1..21: mol_type = other RNA
gccctcttacaacaggggtct

SEQ ID NO: 4465 - RNA, 21 nt, synthetic construct
  source 1..21: mol_type = other RNA
gccttattttattcccatcaa

SEQ ID NO: 4466 - RNA, 21 nt, synthetic construct
  source 1..21: mol_type = other RNA
gctaaagaaaagaagccctct

SEQ ID NO: 4467 - RNA, 21 nt, synthetic construct
  source 1..21: mol_type = other RNA
gctctgttgggggcattttca

SEQ ID NO: 4468 - RNA, 21 nt, synthetic construct
  source 1..21: mol_type = other RNA
gctgaaattgcttttcacatt

SEQ ID NO: 4469 - RNA, 21 nt, synthetic construct
  source 1..21: mol_type = other RNA
gctgtcaaacacaaaaagaaa

SEQ ID NO: 4470 - RNA, 21 nt, synthetic construct
  source 1..21: mol_type = other RNA
gcttcttttctttagctgtca

SEQ ID NO: 4471 - RNA, 21 nt, synthetic construct
  source 1..21: mol_type = other RNA
gcttttcacattctggctctg

SEQ ID NO: 4472 - RNA, 21 nt, synthetic construct
  source 1..21: mol_type = other RNA
ggaataaaataaggctgaaat

SEQ ID NO: 4473 - RNA, 21 nt, synthetic construct
  source 1..21: mol_type = other RNA
ggactctcttcttcataatgg

SEQ ID NO: 4474 - RNA, 21 nt, synthetic construct
  source 1..21: mol_type = other RNA
ggcattttcacatagacccct

SEQ ID NO: 4475 - RNA, 21 nt, synthetic construct
  source 1..21: mol_type = other RNA
ggctctgttgggggcattttc

SEQ ID NO: 4476 - RNA, 21 nt, synthetic construct
  source 1..21: mol_type = other RNA
ggctgaaattgcttttcacat

SEQ ID NO: 4477 - RNA, 21 nt, synthetic construct
  source 1..21: mol_type = other RNA
ggcttcttttctttagctgtc

SEQ ID NO: 4478 - RNA, 21 nt, synthetic construct
  source 1..21: mol_type = other RNA
gggaataaaataaggctgaaa

SEQ ID NO: 4479 - RNA, 21 nt, synthetic construct
  source 1..21: mol_type = other RNA
gggcattttcacatagacccc

SEQ ID NO: 4480 - RNA, 21 nt, synthetic construct
  source 1..21: mol_type = other RNA
gggcttcttttctttagctgt

SEQ ID NO: 4481 - RNA, 21 nt, synthetic construct
  source 1..21: mol_type = other RNA
ggggcattttcacatagaccc

SEQ ID NO: 4482 - RNA, 21 nt, synthetic construct
  source 1..21: mol_type = other RNA
gggggcattttcacatagacc

SEQ ID NO: 4483 - RNA, 21 nt, synthetic construct
  source 1..21: mol_type = other RNA
ggggtctatgtgaaaatgccc

SEQ ID NO: 4484 - RNA, 21 nt, synthetic construct
  source 1..21: mol_type = other RNA
gggtctatgtgaaaatgcccc

SEQ ID NO: 4485 - RNA, 21 nt, synthetic construct
  source 1..21: mol_type = other RNA
ggtctatgtgaaaatgccccc

SEQ ID NO: 4486 - RNA, 21 nt, synthetic construct
  source 1..21: mol_type = other RNA
ggtttctcaattgatgggaat

SEQ ID NO: 4487 - RNA, 21 nt, synthetic construct
  source 1..21: mol_type = other RNA
gtaagagggcttcttttcttt

SEQ ID NO: 4488 - RNA, 21 nt, synthetic construct
  source 1..21: mol_type = other RNA
gtcaaacacaaaaagaaacag

SEQ ID NO: 4489 - RNA, 21 nt, synthetic construct
  source 1..21: mol_type = other RNA
gtctatgtgaaaatgccccca

SEQ ID NO: 4490 - RNA, 21 nt, synthetic construct
  source 1..21: mol_type = other RNA
gtgaaaagcaatttcagcctt

SEQ ID NO: 4491 - RNA, 21 nt, synthetic construct
  source 1..21: mol_type = other RNA
gtgaaaatgcccccaacagag

SEQ ID NO: 4492 - RNA, 21 nt, synthetic construct
  source 1..21: mol_type = other RNA
gtgtttgacagctaaagaaaa

SEQ ID NO: 4493 - RNA, 21 nt, synthetic construct
  source 1..21: mol_type = other RNA
gttgggggcattttcacatag

SEQ ID NO: 4494 - RNA, 21 nt, synthetic construct
  source 1..21: mol_type = other RNA
gttgtaagagggcttcttttc

SEQ ID NO: 4495 - RNA, 21 nt, synthetic construct
  source 1..21: mol_type = other RNA
gtttctcaattgatgggaata

SEQ ID NO: 4496 - RNA, 21 nt, synthetic construct
  source 1..21: mol_type = other RNA
gtttctttttgtgtttgacag

SEQ ID NO: 4497 - RNA, 21 nt, synthetic construct
  source 1..21: mol_type = other RNA
gtttgacagctaaagaaaaga

SEQ ID NO: 4498 - RNA, 21 nt, synthetic construct
  source 1..21: mol_type = other RNA
taaaataaggctgaaattgct

SEQ ID NO: 4499 - RNA, 21 nt, synthetic construct
  source 1..21: mol_type = other RNA
taaagaaaagaagccctctta

SEQ ID NO: 4500 - RNA, 21 nt, synthetic construct
  source 1..21: mol_type = other RNA
taagagggcttcttttcttta

SEQ ID NO: 4501 - RNA, 21 nt, synthetic construct
  source 1..21: mol_type = other RNA
taaggctgaaattgcttttca

SEQ ID NO: 4502 - RNA, 21 nt, synthetic construct
  source 1..21: mol_type = other RNA
taatggtttctcaattgatgg

SEQ ID NO: 4503 - RNA, 21 nt, synthetic construct
  source 1..21: mol_type = other RNA
tacaacaggggtctatgtgaa

SEQ ID NO: 4504 - RNA, 21 nt, synthetic construct
  source 1..21: mol_type = other RNA
tactgtttctttttgtgtttg

SEQ ID NO: 4505 - RNA, 21 nt, synthetic construct
  source 1..21: mol_type = other RNA
tagacccctgttgtaagaggg

SEQ ID NO: 4506 - RNA, 21 nt, synthetic construct
  source 1..21: mol_type = other RNA
tagctgtcaaacacaaaaaga

SEQ ID NO: 4507 - RNA, 21 nt, synthetic construct
  source 1..21: mol_type = other RNA
tatgaagaagagagtccatat

SEQ ID NO: 4508 - RNA, 21 nt, synthetic construct
  source 1..21: mol_type = other RNA
tatggactctcttcttcataa

SEQ ID NO: 4509 - RNA, 21 nt, synthetic construct
  source 1..21: mol_type = other RNA
tatgtgaaaatgcccccaaca

SEQ ID NO: 4510 - RNA, 21 nt, synthetic construct
  source 1..21: mol_type = other RNA
tattcccatcaattgagaaac

SEQ ID NO: 4511 - RNA, 21 nt, synthetic construct
  source 1..21: mol_type = other RNA
tcaaacacaaaaagaaacagt

SEQ ID NO: 4512 - RNA, 21 nt, synthetic construct
  source 1..21: mol_type = other RNA
tcaattgagaaaccattatga

SEQ ID NO: 4513 - RNA, 21 nt, synthetic construct
  source 1..21: mol_type = other RNA
tcacatagacccctgttgtaa

SEQ ID NO: 4514 - RNA, 21 nt, synthetic construct
  source 1..21: mol_type = other RNA
tcacattctggctctgttggg

SEQ ID NO: 4515 - RNA, 21 nt, synthetic construct
  source 1..21: mol_type = other RNA
tcagccttattttattcccat

SEQ ID NO: 4516 - RNA, 21 nt, synthetic construct
  source 1..21: mol_type = other RNA
tcagtagtaattactgtttct

SEQ ID NO: 4517 - RNA, 21 nt, synthetic construct
  source 1..21: mol_type = other RNA
tcataatggtttctcaattga

SEQ ID NO: 4518 - RNA, 21 nt, synthetic construct
  source 1..21: mol_type = other RNA
tcccatcaattgagaaaccat

SEQ ID NO: 4519 - RNA, 21 nt, synthetic construct
  source 1..21: mol_type = other RNA
tcctcagtagtaattactgtt

SEQ ID NO: 4520 - RNA, 21 nt, synthetic construct
  source 1..21: mol_type = other RNA
tctatgtgaaaatgcccccaa

SEQ ID NO: 4521 - RNA, 21 nt, synthetic construct
  source 1..21: mol_type = other RNA
tctcaattgatgggaataaaa

SEQ ID NO: 4522 - RNA, 21 nt, synthetic construct
  source 1..21: mol_type = other RNA
tctcttcttcataatggtttc

SEQ ID NO: 4523 - RNA, 21 nt, synthetic construct
  source 1..21: mol_type = other RNA
tctggctctgttgggggcatt

SEQ ID NO: 4524 - RNA, 21 nt, synthetic construct
  source 1..21: mol_type = other RNA
tctgttgggggcattttcaca

SEQ ID NO: 4525 - RNA, 21 nt, synthetic construct
  source 1..21: mol_type = other RNA
tcttacaacaggggtctatgt

SEQ ID NO: 4526 - RNA, 21 nt, synthetic construct
  source 1..21: mol_type = other RNA
tcttcataatggtttctcaat

SEQ ID NO: 4527 - RNA, 21 nt, synthetic construct
  source 1..21: mol_type = other RNA
tcttcttcataatggtttctc

SEQ ID NO: 4528 - RNA, 21 nt, synthetic construct
  source 1..21: mol_type = other RNA
tctttagctgtcaaacacaaa

SEQ ID NO: 4529 - RNA, 21 nt, synthetic construct
  source 1..21: mol_type = other RNA
tcttttctttagctgtcaaac

SEQ ID NO: 4530 - RNA, 21 nt, synthetic construct
  source 1..21: mol_type = other RNA
tctttttgtgtttgacagcta

SEQ ID NO: 4531 - RNA, 21 nt, synthetic construct
  source 1..21: mol_type = other RNA
tgaaaagcaatttcagcctta

SEQ ID NO: 4532 - RNA, 21 nt, synthetic construct
  source 1..21: mol_type = other RNA
tgaaaatgcccccaacagagc

SEQ ID NO: 4533 - RNA, 21 nt, synthetic construct
  source 1..21: mol_type = other RNA
tgaaatatggactctcttctt

SEQ ID NO: 4534 - RNA, 21 nt, synthetic construct
  source 1..21: mol_type = other RNA
tgaaattgcttttcacattct

SEQ ID NO: 4535 - RNA, 21 nt, synthetic construct
  source 1..21: mol_type = other RNA
tgacagctaaagaaaagaagc

SEQ ID NO: 4536 - RNA, 21 nt, synthetic construct
  source 1..21: mol_type = other RNA
tgagaaaccattatgaagaag

SEQ ID NO: 4537 - RNA, 21 nt, synthetic construct
  source 1..21: mol_type = other RNA
tgatgggaataaaataaggct

SEQ ID NO: 4538 - RNA, 21 nt, synthetic construct
  source 1..21: mol_type = other RNA
tgcccccaacagagccagaat

SEQ ID NO: 4539 - RNA, 21 nt, synthetic construct
  source 1..21: mol_type = other RNA
tgcttttcacattctggctct

SEQ ID NO: 4540 - RNA, 21 nt, synthetic construct
  source 1..21: mol_type = other RNA
tggactctcttcttcataatg

SEQ ID NO: 4541 - RNA, 21 nt, synthetic construct
  source 1..21: mol_type = other RNA
tggctctgttgggggcatttt

SEQ ID NO: 4542 - RNA, 21 nt, synthetic construct
  source 1..21: mol_type = other RNA
tgggaataaaataaggctgaa

SEQ ID NO: 4543 - RNA, 21 nt, synthetic construct
  source 1..21: mol_type = other RNA
tgggggcattttcacatagac

SEQ ID NO: 4544 - RNA, 21 nt, synthetic construct
  source 1..21: mol_type = other RNA
tggtttctcaattgatgggaa

SEQ ID NO: 4545 - RNA, 21 nt, synthetic construct
  source 1..21: mol_type = other RNA
tgtaagagggcttcttttctt

SEQ ID NO: 4546 - RNA, 21 nt, synthetic construct
  source 1..21: mol_type = other RNA
tgtcaaacacaaaaagaaaca

SEQ ID NO: 4547 - RNA, 21 nt, synthetic construct
  source 1..21: mol_type = other RNA
tgtgaaaagcaatttcagcct

SEQ ID NO: 4548 - RNA, 21 nt, synthetic construct
  source 1..21: mol_type = other RNA
tgtgaaaatgcccccaacaga

SEQ ID NO: 4549 - RNA, 21 nt, synthetic construct
  source 1..21: mol_type = other RNA
tgtgtttgacagctaaagaaa

SEQ ID NO: 4550 - RNA, 21 nt, synthetic construct
  source 1..21: mol_type = other RNA
tgttgggggcattttcacata

SEQ ID NO: 4551 - RNA, 21 nt, synthetic construct
  source 1..21: mol_type = other RNA
tgttgtaagagggcttctttt

SEQ ID NO: 4552 - RNA, 21 nt, synthetic construct
  source 1..21: mol_type = other RNA
tgtttctttttgtgtttgaca

SEQ ID NO: 4553 - RNA, 21 nt, synthetic construct
  source 1..21: mol_type = other RNA
tgtttgacagctaaagaaaag

SEQ ID NO: 4554 - RNA, 21 nt, synthetic construct
  source 1..21: mol_type = other RNA
ttacaacaggggtctatgtga

SEQ ID NO: 4555 - RNA, 21 nt, synthetic construct
  source 1..21: mol_type = other RNA
ttagctgtcaaacacaaaaag

SEQ ID NO: 4556 - RNA, 21 nt, synthetic construct
  source 1..21: mol_type = other RNA
ttatgaagaagagagtccata

SEQ ID NO: 4557 - RNA, 21 nt, synthetic construct
  source 1..21: mol_type = other RNA
ttattcccatcaattgagaaa

SEQ ID NO: 4558 - RNA, 21 nt, synthetic construct
  source 1..21: mol_type = other RNA
ttcacatagacccctgttgta

SEQ ID NO: 4559 - RNA, 21 nt, synthetic construct
  source 1..21: mol_type = other RNA
ttcacattctggctctgttgg

SEQ ID NO: 4560 - RNA, 21 nt, synthetic construct
  source 1..21: mol_type = other RNA
ttcagccttattttattccca

SEQ ID NO: 4561 - RNA, 21 nt, synthetic construct
  source 1..21: mol_type = other RNA
ttcataatggtttctcaattg

SEQ ID NO: 4562 - RNA, 21 nt, synthetic construct
  source 1..21: mol_type = other RNA
ttcccatcaattgagaaacca

SEQ ID NO: 4563 - RNA, 21 nt, synthetic construct
  source 1..21: mol_type = other RNA
ttctcaattgatgggaataaa

SEQ ID NO: 4564 - RNA, 21 nt, synthetic construct
  source 1..21: mol_type = other RNA
ttctggctctgttgggggcat

SEQ ID NO: 4565 - RNA, 21 nt, synthetic construct
  source 1..21: mol_type = other RNA
ttcttcataatggtttctcaa

SEQ ID NO: 4566 - RNA, 21 nt, synthetic construct
  source 1..21: mol_type = other RNA
ttctttagctgtcaaacacaa

SEQ ID NO: 4567 - RNA, 21 nt, synthetic construct
  source 1..21: mol_type = other RNA
ttcttttctttagctgtcaaa

SEQ ID NO: 4568 - RNA, 21 nt, synthetic construct
  source 1..21: mol_type = other RNA
ttctttttgtgtttgacagct

SEQ ID NO: 4569 - RNA, 21 nt, synthetic construct
  source 1..21: mol_type = other RNA
ttgaaatatggactctcttct

SEQ ID NO: 4570 - RNA, 21 nt, synthetic construct
  source 1..21: mol_type = other RNA
ttgacagctaaagaaaagaag

SEQ ID NO: 4571 - RNA, 21 nt, synthetic construct
  source 1..21: mol_type = other RNA
ttgagaaaccattatgaagaa

SEQ ID NO: 4572 - RNA, 21 nt, synthetic construct
  source 1..21: mol_type = other RNA
ttgatgggaataaaataaggc

SEQ ID NO: 4573 - RNA, 21 nt, synthetic construct
  source 1..21: mol_type = other RNA
ttgcttttcacattctggctc

SEQ ID NO: 4574 - RNA, 21 nt, synthetic construct
  source 1..21: mol_type = other RNA
ttgggggcattttcacataga

SEQ ID NO: 4575 - RNA, 21 nt, synthetic construct
  source 1..21: mol_type = other RNA
ttgtaagagggcttcttttct

SEQ ID NO: 4576 - RNA, 21 nt, synthetic construct
  source 1..21: mol_type = other RNA
ttgtgtttgacagctaaagaa

SEQ ID NO: 4577 - RNA, 21 nt, synthetic construct
  source 1..21: mol_type = other RNA
tttagctgtcaaacacaaaaa

SEQ ID NO: 4578 - RNA, 21 nt, synthetic construct
  source 1..21: mol_type = other RNA
tttattcccatcaattgagaa

SEQ ID NO: 4579 - RNA, 21 nt, synthetic construct
  source 1..21: mol_type = other RNA
tttcacatagacccctgttgt

SEQ ID NO: 4580 - RNA, 21 nt, synthetic construct
  source 1..21: mol_type = other RNA
tttcacattctggctctgttg

SEQ ID NO: 4581 - RNA, 21 nt, synthetic construct
  source 1..21: mol_type = other RNA
tttcagccttattttattccc

SEQ ID NO: 4582 - RNA, 21 nt, synthetic construct
  source 1..21: mol_type = other RNA
tttctcaattgatgggaataa

SEQ ID NO: 4583 - RNA, 21 nt, synthetic construct
  source 1..21: mol_type = other RNA
tttctttagctgtcaaacaca

SEQ ID NO: 4584 - RNA, 21 nt, synthetic construct
  source 1..21: mol_type = other RNA
tttctttttgtgtttgacagc

SEQ ID NO: 4585 - RNA, 21 nt, synthetic construct
  source 1..21: mol_type = other RNA
tttgacagctaaagaaaagaa

SEQ ID NO: 4586 - RNA, 21 nt, synthetic construct
  source 1..21: mol_type = other RNA
tttgtgtttgacagctaaaga

SEQ ID NO: 4587 - RNA, 21 nt, synthetic construct
  source 1..21: mol_type = other RNA
ttttattcccatcaattgaga

SEQ ID NO: 4588 - RNA, 21 nt, synthetic construct
  source 1..21: mol_type = other RNA
ttttcacatagacccctgttg

SEQ ID NO: 4589 - RNA, 21 nt, synthetic construct
  source 1..21: mol_type = other RNA
ttttcacattctggctctgtt

SEQ ID NO: 4590 - RNA, 21 nt, synthetic construct
  source 1..21: mol_type = other RNA
ttttctttagctgtcaaacac

SEQ ID NO: 4591 - RNA, 21 nt, synthetic construct
  source 1..21: mol_type = other RNA
ttttgtgtttgacagctaaag

SEQ ID NO: 4592 - RNA, 21 nt, synthetic construct
  source 1..21: mol_type = other RNA
tttttgtgtttgacagctaaa

SEQ ID NO: 4593 - RNA, 22 nt, synthetic construct
  source 1..22: mol_type = other RNA
aaaagaagccctcttacaacag

SEQ ID NO: 4594 - RNA, 22 nt, synthetic construct
  source 1..22: mol_type = other RNA
aaaagcaatttcagccttattt

SEQ ID NO: 4595 - RNA, 22 nt, synthetic construct
  source 1..22: mol_type = other RNA
aaaataaggctgaaattgcttt

SEQ ID NO: 4596 - RNA, 22 nt, synthetic construct
  source 1..22: mol_type = other RNA
aaaatgcccccaacagagccag

SEQ ID NO: 4597 - RNA, 22 nt, synthetic construct
  source 1..22: mol_type = other RNA
aaaccattatgaagaagagagt

SEQ ID NO: 4598 - RNA, 22 nt, synthetic construct
  source 1..22: mol_type = other RNA
aaagaaaagaagccctcttaca

SEQ ID NO: 4599 - RNA, 22 nt, synthetic construct
  source 1..22: mol_type = other RNA
aaagaagccctcttacaacagg

SEQ ID NO: 4600 - RNA, 22 nt, synthetic construct
  source 1..22: mol_type = other RNA
aaagcaatttcagccttatttt

SEQ ID NO: 4601 - RNA, 22 nt, synthetic construct
  source 1..22: mol_type = other RNA
aaataaggctgaaattgctttt

SEQ ID NO: 4602 - RNA, 22 nt, synthetic construct
  source 1..22: mol_type = other RNA
aaatatggactctcttcttcat

SEQ ID NO: 4603 - RNA, 22 nt, synthetic construct
  source 1..22: mol_type = other RNA
aaatgcccccaacagagccaga

SEQ ID NO: 4604 - RNA, 22 nt, synthetic construct
  source 1..22: mol_type = other RNA
aaattgaaatatggactctctt

SEQ ID NO: 4605 - RNA, 22 nt, synthetic construct
  source 1..22: mol_type = other RNA
aaattgcttttcacattctggc

SEQ ID NO: 4606 - RNA, 22 nt, synthetic construct
  source 1..22: mol_type = other RNA
aacagagccagaatgtgaaaag

SEQ ID NO: 4607 - RNA, 22 nt, synthetic construct
  source 1..22: mol_type = other RNA
aacaggggtctatgtgaaaatg

SEQ ID NO: 4608 - RNA, 22 nt, synthetic construct
  source 1..22: mol_type = other RNA
aaccattatgaagaagagagtc

SEQ ID NO: 4609 - RNA, 22 nt, synthetic construct
  source 1..22: mol_type = other RNA
aagaaaagaagccctcttacaa

SEQ ID NO: 4610 - RNA, 22 nt, synthetic construct
  source 1..22: mol_type = other RNA
aagaagccctcttacaacaggg

SEQ ID NO: 4611 - RNA, 22 nt, synthetic construct
  source 1..22: mol_type = other RNA
aagagggcttcttttctttagc

SEQ ID NO: 4612 - RNA, 22 nt, synthetic construct
  source 1..22: mol_type = other RNA
aagcaatttcagccttatttta

SEQ ID NO: 4613 - RNA, 22 nt, synthetic construct
  source 1..22: mol_type = other RNA
aagccctcttacaacaggggtc

SEQ ID NO: 4614 - RNA, 22 nt, synthetic construct
  source 1..22: mol_type = other RNA
aaggctgaaattgcttttcaca

SEQ ID NO: 4615 - RNA, 22 nt, synthetic construct
  source 1..22: mol_type = other RNA
aataaaataaggctgaaattgc

SEQ ID NO: 4616 - RNA, 22 nt, synthetic construct
  source 1..22: mol_type = other RNA
aataaggctgaaattgcttttc

SEQ ID NO: 4617 - RNA, 22 nt, synthetic construct
  source 1..22: mol_type = other RNA
aatatggactctcttcttcata

SEQ ID NO: 4618 - RNA, 22 nt, synthetic construct
  source 1..22: mol_type = other RNA
aatgcccccaacagagccagaa

SEQ ID NO: 4619 - RNA, 22 nt, synthetic construct
  source 1..22: mol_type = other RNA
aatggtttctcaattgatggga

SEQ ID NO: 4620 - RNA, 22 nt, synthetic construct
  source 1..22: mol_type = other RNA
aatgtgaaaagcaatttcagcc

SEQ ID NO: 4621 - RNA, 22 nt, synthetic construct
  source 1..22: mol_type = other RNA
aattgaaatatggactctcttc

SEQ ID NO: 4622 - RNA, 22 nt, synthetic construct
  source 1..22: mol_type = other RNA
aattgagaaaccattatgaaga

SEQ ID NO: 4623 - RNA, 22 nt, synthetic construct
  source 1..22: mol_type = other RNA
aattgatgggaataaaataagg

SEQ ID NO: 4624 - RNA, 22 nt, synthetic construct
  source 1..22: mol_type = other RNA
aattgcttttcacattctggct

SEQ ID NO: 4625 - RNA, 22 nt, synthetic construct
  source 1..22: mol_type = other RNA
aatttcagccttattttattcc

SEQ ID NO: 4626 - RNA, 22 nt, synthetic construct
  source 1..22: mol_type = other RNA
acaacaggggtctatgtgaaaa

SEQ ID NO: 4627 - RNA, 22 nt, synthetic construct
  source 1..22: mol_type = other RNA
acagagccagaatgtgaaaagc

SEQ ID NO: 4628 - RNA, 22 nt, synthetic construct
  source 1..22: mol_type = other RNA
acagctaaagaaaagaagccct

SEQ ID NO: 4629 - RNA, 22 nt, synthetic construct
  source 1..22: mol_type = other RNA
acaggggtctatgtgaaaatgc

SEQ ID NO: 4630 - RNA, 22 nt, synthetic construct
  source 1..22: mol_type = other RNA
acatagacccctgttgtaagag

SEQ ID NO: 4631 - RNA, 22 nt, synthetic construct
  source 1..22: mol_type = other RNA
acattctggctctgttgggggc

SEQ ID NO: 4632 - RNA, 22 nt, synthetic construct
  source 1..22: mol_type = other RNA
accattatgaagaagagagtcc

SEQ ID NO: 4633 - RNA, 22 nt, synthetic construct
  source 1..22: mol_type = other RNA
acccctgttgtaagagggcttc

SEQ ID NO: 4634 - RNA, 22 nt, synthetic construct
  source 1..22: mol_type = other RNA
actctcttcttcataatggttt

SEQ ID NO: 4635 - RNA, 22 nt, synthetic construct
  source 1..22: mol_type = other RNA
actgtttctttttgtgtttgac

SEQ ID NO: 4636 - RNA, 22 nt, synthetic construct
  source 1..22: mol_type = other RNA
agaaaagaagccctcttacaac

SEQ ID NO: 4637 - RNA, 22 nt, synthetic construct
  source 1..22: mol_type = other RNA
agaaaccattatgaagaagaga

SEQ ID NO: 4638 - RNA, 22 nt, synthetic construct
  source 1..22: mol_type = other RNA
agaagccctcttacaacagggg

SEQ ID NO: 4639 - RNA, 22 nt, synthetic construct
  source 1..22: mol_type = other RNA
agaatgtgaaaagcaatttcag

SEQ ID NO: 4640 - RNA, 22 nt, synthetic construct
  source 1..22: mol_type = other RNA
agacccctgttgtaagagggct

SEQ ID NO: 4641 - RNA, 22 nt, synthetic construct
  source 1..22: mol_type = other RNA
agagccagaatgtgaaaagcaa

SEQ ID NO: 4642 - RNA, 22 nt, synthetic construct
  source 1..22: mol_type = other RNA
agagggcttcttttctttagct

SEQ ID NO: 4643 - RNA, 22 nt, synthetic construct
  source 1..22: mol_type = other RNA
agcaatttcagccttattttat

SEQ ID NO: 4644 - RNA, 22 nt, synthetic construct
  source 1..22: mol_type = other RNA
agccagaatgtgaaaagcaatt

SEQ ID NO: 4645 - RNA, 22 nt, synthetic construct
  source 1..22: mol_type = other RNA
agccctcttacaacaggggtct

SEQ ID NO: 4646 - RNA, 22 nt, synthetic construct
  source 1..22: mol_type = other RNA
agccttattttattcccatcaa

SEQ ID NO: 4647 - RNA, 22 nt, synthetic construct
  source 1..22: mol_type = other RNA
agctaaagaaaagaagccctct

SEQ ID NO: 4648 - RNA, 22 nt, synthetic construct
  source 1..22: mol_type = other RNA
agctgtcaaacacaaaaagaaa

SEQ ID NO: 4649 - RNA, 22 nt, synthetic construct
  source 1..22: mol_type = other RNA
aggctgaaattgcttttcacat

SEQ ID NO: 4650 - RNA, 22 nt, synthetic construct
  source 1..22: mol_type = other RNA
agggcttcttttctttagctgt

SEQ ID NO: 4651 - RNA, 22 nt, synthetic construct
  source 1..22: mol_type = other RNA
aggggtctatgtgaaaatgccc

SEQ ID NO: 4652 - RNA, 22 nt, synthetic construct
  source 1..22: mol_type = other RNA
ataaaataaggctgaaattgct

SEQ ID NO: 4653 - RNA, 22 nt, synthetic construct
  source 1..22: mol_type = other RNA
ataaggctgaaattgcttttca

SEQ ID NO: 4654 - RNA, 22 nt, synthetic construct
  source 1..22: mol_type = other RNA
ataatggtttctcaattgatgg

SEQ ID NO: 4655 - RNA, 22 nt, synthetic construct
  source 1..22: mol_type = other RNA
atagacccctgttgtaagaggg

SEQ ID NO: 4656 - RNA, 22 nt, synthetic construct
  source 1..22: mol_type = other RNA
atatggactctcttcttcataa

SEQ ID NO: 4657 - RNA, 22 nt, synthetic construct
  source 1..22: mol_type = other RNA
atcaattgagaaaccattatga

SEQ ID NO: 4658 - RNA, 22 nt, synthetic construct
  source 1..22: mol_type = other RNA
atgcccccaacagagccagaat

SEQ ID NO: 4659 - RNA, 22 nt, synthetic construct
  source 1..22: mol_type = other RNA
atggactctcttcttcataatg

SEQ ID NO: 4660 - RNA, 22 nt, synthetic construct
  source 1..22: mol_type = other RNA
atgggaataaaataaggctgaa

SEQ ID NO: 4661 - RNA, 22 nt, synthetic construct
  source 1..22: mol_type = other RNA
atggtttctcaattgatgggaa

SEQ ID NO: 4662 - RNA, 22 nt, synthetic construct
  source 1..22: mol_type = other RNA
atgtgaaaagcaatttcagcct

SEQ ID NO: 4663 - RNA, 22 nt, synthetic construct
  source 1..22: mol_type = other RNA
atgtgaaaatgcccccaacaga

SEQ ID NO: 4664 - RNA, 22 nt, synthetic construct
  source 1..22: mol_type = other RNA
attatgaagaagagagtccata

SEQ ID NO: 4665 - RNA, 22 nt, synthetic construct
  source 1..22: mol_type = other RNA
attcccatcaattgagaaacca

SEQ ID NO: 4666 - RNA, 22 nt, synthetic construct
  source 1..22: mol_type = other RNA
attctggctctgttgggggcat

SEQ ID NO: 4667 - RNA, 22 nt, synthetic construct
  source 1..22: mol_type = other RNA
attgaaatatggactctcttct

SEQ ID NO: 4668 - RNA, 22 nt, synthetic construct
  source 1..22: mol_type = other RNA
attgagaaaccattatgaagaa

SEQ ID NO: 4669 - RNA, 22 nt, synthetic construct
  source 1..22: mol_type = other RNA
attgatgggaataaaataaggc

SEQ ID NO: 4670 - RNA, 22 nt, synthetic construct
  source 1..22: mol_type = other RNA
attgcttttcacattctggctc

SEQ ID NO: 4671 - RNA, 22 nt, synthetic construct
  source 1..22: mol_type = other RNA
atttcagccttattttattccc

SEQ ID NO: 4672 - RNA, 22 nt, synthetic construct
  source 1..22: mol_type = other RNA
attttattcccatcaattgaga

SEQ ID NO: 4673 - RNA, 22 nt, synthetic construct
  source 1..22: mol_type = other RNA
attttcacatagacccctgttg

SEQ ID NO: 4674 - RNA, 22 nt, synthetic construct
  source 1..22: mol_type = other RNA
caaacacaaaaagaaacagtaa

SEQ ID NO: 4675 - RNA, 22 nt, synthetic construct
  source 1..22: mol_type = other RNA
caacagagccagaatgtgaaaa

SEQ ID NO: 4676 - RNA, 22 nt, synthetic construct
  source 1..22: mol_type = other RNA
caacaggggtctatgtgaaaat

SEQ ID NO: 4677 - RNA, 22 nt, synthetic construct
  source 1..22: mol_type = other RNA
caattgagaaaccattatgaag

SEQ ID NO: 4678 - RNA, 22 nt, synthetic construct
  source 1..22: mol_type = other RNA
caattgatgggaataaaataag

SEQ ID NO: 4679 - RNA, 22 nt, synthetic construct
  source 1..22: mol_type = other RNA
caatttcagccttattttattc

SEQ ID NO: 4680 - RNA, 22 nt, synthetic construct
  source 1..22: mol_type = other RNA
cacaaaaagaaacagtaattac

SEQ ID NO: 4681 - RNA, 22 nt, synthetic construct
  source 1..22: mol_type = other RNA
cacatagacccctgttgtaaga

SEQ ID NO: 4682 - RNA, 22 nt, synthetic construct
  source 1..22: mol_type = other RNA
cacattctggctctgttggggg

SEQ ID NO: 4683 - RNA, 22 nt, synthetic construct
  source 1..22: mol_type = other RNA
cagaatgtgaaaagcaatttca

SEQ ID NO: 4684 - RNA, 22 nt, synthetic construct
  source 1..22: mol_type = other RNA
cagagccagaatgtgaaaagca

SEQ ID NO: 4685 - RNA, 22 nt, synthetic construct
  source 1..22: mol_type = other RNA
cagccttattttattcccatca

SEQ ID NO: 4686 - RNA, 22 nt, synthetic construct
  source 1..22: mol_type = other RNA
cagctaaagaaaagaagccctc

SEQ ID NO: 4687 - RNA, 22 nt, synthetic construct
  source 1..22: mol_type = other RNA
caggggtctatgtgaaaatgcc

SEQ ID NO: 4688 - RNA, 22 nt, synthetic construct
  source 1..22: mol_type = other RNA
cagtagtaattactgtttcttt

SEQ ID NO: 4689 - RNA, 22 nt, synthetic construct
  source 1..22: mol_type = other RNA
cataatggtttctcaattgatg

SEQ ID NO: 4690 - RNA, 22 nt, synthetic construct
  source 1..22: mol_type = other RNA
catagacccctgttgtaagagg

SEQ ID NO: 4691 - RNA, 22 nt, synthetic construct
  source 1..22: mol_type = other RNA
catcaattgagaaaccattatg

SEQ ID NO: 4692 - RNA, 22 nt, synthetic construct
  source 1..22: mol_type = other RNA
cattatgaagaagagagtccat

SEQ ID NO: 4693 - RNA, 22 nt, synthetic construct
  source 1..22: mol_type = other RNA
cattctggctctgttgggggca

SEQ ID NO: 4694 - RNA, 22 nt, synthetic construct
  source 1..22: mol_type = other RNA
cattttcacatagacccctgtt

SEQ ID NO: 4695 - RNA, 22 nt, synthetic construct
  source 1..22: mol_type = other RNA
ccaacagagccagaatgtgaaa

SEQ ID NO: 4696 - RNA, 22 nt, synthetic construct
  source 1..22: mol_type = other RNA
ccagaatgtgaaaagcaatttc

SEQ ID NO: 4697 - RNA, 22 nt, synthetic construct
  source 1..22: mol_type = other RNA
ccatcaattgagaaaccattat

SEQ ID NO: 4698 - RNA, 22 nt, synthetic construct
  source 1..22: mol_type = other RNA
ccattatgaagaagagagtcca

SEQ ID NO: 4699 - RNA, 22 nt, synthetic construct
  source 1..22: mol_type = other RNA
cccaacagagccagaatgtgaa

SEQ ID NO: 4700 - RNA, 22 nt, synthetic construct
  source 1..22: mol_type = other RNA
cccatcaattgagaaaccatta

SEQ ID NO: 4701 - RNA, 22 nt, synthetic construct
  source 1..22: mol_type = other RNA
ccccaacagagccagaatgtga

SEQ ID NO: 4702 - RNA, 22 nt, synthetic construct
  source 1..22: mol_type = other RNA
cccccaacagagccagaatgtg

SEQ ID NO: 4703 - RNA, 22 nt, synthetic construct
  source 1..22: mol_type = other RNA
cccctgttgtaagagggcttct

SEQ ID NO: 4704 - RNA, 22 nt, synthetic construct
  source 1..22: mol_type = other RNA
ccctcttacaacaggggtctat

SEQ ID NO: 4705 - RNA, 22 nt, synthetic construct
  source 1..22: mol_type = other RNA
ccctgttgtaagagggcttctt

SEQ ID NO: 4706 - RNA, 22 nt, synthetic construct
  source 1..22: mol_type = other RNA
cctcagtagtaattactgtttc

SEQ ID NO: 4707 - RNA, 22 nt, synthetic construct
  source 1..22: mol_type = other RNA
cctcttacaacaggggtctatg

SEQ ID NO: 4708 - RNA, 22 nt, synthetic construct
  source 1..22: mol_type = other RNA
cctgttgtaagagggcttcttt

SEQ ID NO: 4709 - RNA, 22 nt, synthetic construct
  source 1..22: mol_type = other RNA
ccttattttattcccatcaatt

SEQ ID NO: 4710 - RNA, 22 nt, synthetic construct
  source 1..22: mol_type = other RNA
ctaaagaaaagaagccctctta

SEQ ID NO: 4711 - RNA, 22 nt, synthetic construct
  source 1..22: mol_type = other RNA
ctatgtgaaaatgcccccaaca

SEQ ID NO: 4712 - RNA, 22 nt, synthetic construct
  source 1..22: mol_type = other RNA
ctcaattgatgggaataaaata

SEQ ID NO: 4713 - RNA, 22 nt, synthetic construct
  source 1..22: mol_type = other RNA
ctcagtagtaattactgtttct

SEQ ID NO: 4714 - RNA, 22 nt, synthetic construct
  source 1..22: mol_type = other RNA
ctctcttcttcataatggtttc

SEQ ID NO: 4715 - RNA, 22 nt, synthetic construct
  source 1..22: mol_type = other RNA
ctctgttgggggcattttcaca

SEQ ID NO: 4716 - RNA, 22 nt, synthetic construct
  source 1..22: mol_type = other RNA
ctcttacaacaggggtctatgt

SEQ ID NO: 4717 - RNA, 22 nt, synthetic construct
  source 1..22: mol_type = other RNA
ctcttcttcataatggtttctc

SEQ ID NO: 4718 - RNA, 22 nt, synthetic construct
  source 1..22: mol_type = other RNA
ctgaaattgcttttcacattct

SEQ ID NO: 4719 - RNA, 22 nt, synthetic construct
  source 1..22: mol_type = other RNA
ctggctctgttgggggcatttt

SEQ ID NO: 4720 - RNA, 22 nt, synthetic construct
  source 1..22: mol_type = other RNA
ctgtcaaacacaaaaagaaaca

SEQ ID NO: 4721 - RNA, 22 nt, synthetic construct
  source 1..22: mol_type = other RNA
ctgttgggggcattttcacata

SEQ ID NO: 4722 - RNA, 22 nt, synthetic construct
  source 1..22: mol_type = other RNA
ctgttgtaagagggcttctttt

SEQ ID NO: 4723 - RNA, 22 nt, synthetic construct
  source 1..22: mol_type = other RNA
ctgtttctttttgtgtttgaca

SEQ ID NO: 4724 - RNA, 22 nt, synthetic construct
  source 1..22: mol_type = other RNA
cttacaacaggggtctatgtga

SEQ ID NO: 4725 - RNA, 22 nt, synthetic construct
  source 1..22: mol_type = other RNA
cttattttattcccatcaattg

SEQ ID NO: 4726 - RNA, 22 nt, synthetic construct
  source 1..22: mol_type = other RNA
cttcataatggtttctcaattg

SEQ ID NO: 4727 - RNA, 22 nt, synthetic construct
  source 1..22: mol_type = other RNA
cttcttcataatggtttctcaa

SEQ ID NO: 4728 - RNA, 22 nt, synthetic construct
  source 1..22: mol_type = other RNA
cttcttttctttagctgtcaaa

SEQ ID NO: 4729 - RNA, 22 nt, synthetic construct
  source 1..22: mol_type = other RNA
ctttagctgtcaaacacaaaaa

SEQ ID NO: 4730 - RNA, 22 nt, synthetic construct
  source 1..22: mol_type = other RNA
cttttcacattctggctctgtt

SEQ ID NO: 4731 - RNA, 22 nt, synthetic construct
  source 1..22: mol_type = other RNA
cttttctttagctgtcaaacac

SEQ ID NO: 4732 - RNA, 22 nt, synthetic construct
  source 1..22: mol_type = other RNA
ctttttgtgtttgacagctaaa

SEQ ID NO: 4733 - RNA, 22 nt, synthetic construct
  source 1..22: mol_type = other RNA
gaaaagaagccctcttacaaca

SEQ ID NO: 4734 - RNA, 22 nt, synthetic construct
  source 1..22: mol_type = other RNA
gaaaagcaatttcagccttatt

SEQ ID NO: 4735 - RNA, 22 nt, synthetic construct
  source 1..22: mol_type = other RNA
gaaaatgcccccaacagagcca

SEQ ID NO: 4736 - RNA, 22 nt, synthetic construct
  source 1..22: mol_type = other RNA
gaaaccattatgaagaagagag

SEQ ID NO: 4737 - RNA, 22 nt, synthetic construct
  source 1..22: mol_type = other RNA
gaaatatggactctcttcttca

SEQ ID NO: 4738 - RNA, 22 nt, synthetic construct
  source 1..22: mol_type = other RNA
gaaattgaaatatggactctct

SEQ ID NO: 4739 - RNA, 22 nt, synthetic construct
  source 1..22: mol_type = other RNA
gaaattgcttttcacattctgg

SEQ ID NO: 4740 - RNA, 22 nt, synthetic construct
  source 1..22: mol_type = other RNA
gaagccctcttacaacaggggt

SEQ ID NO: 4741 - RNA, 22 nt, synthetic construct
  source 1..22: mol_type = other RNA
gaataaaataaggctgaaattg

SEQ ID NO: 4742 - RNA, 22 nt, synthetic construct
  source 1..22: mol_type = other RNA
gaatgtgaaaagcaatttcagc

SEQ ID NO: 4743 - RNA, 22 nt, synthetic construct
  source 1..22: mol_type = other RNA
gacagctaaagaaaagaagccc

SEQ ID NO: 4744 - RNA, 22 nt, synthetic construct
  source 1..22: mol_type = other RNA
gacccctgttgtaagagggctt

SEQ ID NO: 4745 - RNA, 22 nt, synthetic construct
  source 1..22: mol_type = other RNA
gactctcttcttcataatggtt

SEQ ID NO: 4746 - RNA, 22 nt, synthetic construct
  source 1..22: mol_type = other RNA
gagaaaccattatgaagaagag

SEQ ID NO: 4747 - RNA, 22 nt, synthetic construct
  source 1..22: mol_type = other RNA
gagccagaatgtgaaaagcaat

SEQ ID NO: 4748 - RNA, 22 nt, synthetic construct
  source 1..22: mol_type = other RNA
gagggcttcttttctttagctg

SEQ ID NO: 4749 - RNA, 22 nt, synthetic construct
  source 1..22: mol_type = other RNA
gatgggaataaaataaggctga

SEQ ID NO: 4750 - RNA, 22 nt, synthetic construct
  source 1..22: mol_type = other RNA
gcaatttcagccttattttatt

SEQ ID NO: 4751 - RNA, 22 nt, synthetic construct
  source 1..22: mol_type = other RNA
gcattttcacatagacccctgt

SEQ ID NO: 4752 - RNA, 22 nt, synthetic construct
  source 1..22: mol_type = other RNA
gccagaatgtgaaaagcaattt

SEQ ID NO: 4753 - RNA, 22 nt, synthetic construct
  source 1..22: mol_type = other RNA
gcccccaacagagccagaatgt

SEQ ID NO: 4754 - RNA, 22 nt, synthetic construct
  source 1..22: mol_type = other RNA
gccctcttacaacaggggtcta

SEQ ID NO: 4755 - RNA, 22 nt, synthetic construct
  source 1..22: mol_type = other RNA
gccttattttattcccatcaat

SEQ ID NO: 4756 - RNA, 22 nt, synthetic construct
  source 1..22: mol_type = other RNA
gctaaagaaaagaagccctctt

SEQ ID NO: 4757 - RNA, 22 nt, synthetic construct
  source 1..22: mol_type = other RNA
gctctgttgggggcattttcac

SEQ ID NO: 4758 - RNA, 22 nt, synthetic construct
  source 1..22: mol_type = other RNA
gctgaaattgcttttcacattc

SEQ ID NO: 4759 - RNA, 22 nt, synthetic construct
  source 1..22: mol_type = other RNA
gctgtcaaacacaaaaagaaac

SEQ ID NO: 4760 - RNA, 22 nt, synthetic construct
  source 1..22: mol_type = other RNA
gcttcttttctttagctgtcaa

SEQ ID NO: 4761 - RNA, 22 nt, synthetic construct
  source 1..22: mol_type = other RNA
gcttttcacattctggctctgt

SEQ ID NO: 4762 - RNA, 22 nt, synthetic construct
  source 1..22: mol_type = other RNA
ggaataaaataaggctgaaatt

SEQ ID NO: 4763 - RNA, 22 nt, synthetic construct
  source 1..22: mol_type = other RNA
ggactctcttcttcataatggt

SEQ ID NO: 4764 - RNA, 22 nt, synthetic construct
  source 1..22: mol_type = other RNA
ggcattttcacatagacccctg

SEQ ID NO: 4765 - RNA, 22 nt, synthetic construct
  source 1..22: mol_type = other RNA
ggctctgttgggggcattttca

SEQ ID NO: 4766 - RNA, 22 nt, synthetic construct
  source 1..22: mol_type = other RNA
ggctgaaattgcttttcacatt

SEQ ID NO: 4767 - RNA, 22 nt, synthetic construct
  source 1..22: mol_type = other RNA
ggcttcttttctttagctgtca

SEQ ID NO: 4768 - RNA, 22 nt, synthetic construct
  source 1..22: mol_type = other RNA
gggaataaaataaggctgaaat

SEQ ID NO: 4769 - RNA, 22 nt, synthetic construct
  source 1..22: mol_type = other RNA
gggcattttcacatagacccct

SEQ ID NO: 4770 - RNA, 22 nt, synthetic construct
  source 1..22: mol_type = other RNA
gggcttcttttctttagctgtc

SEQ ID NO: 4771 - RNA, 22 nt, synthetic construct
  source 1..22: mol_type = other RNA
ggggcattttcacatagacccc

SEQ ID NO: 4772 - RNA, 22 nt, synthetic construct
  source 1..22: mol_type = other RNA
gggggcattttcacatagaccc

SEQ ID NO: 4773 - RNA, 22 nt, synthetic construct
  source 1..22: mol_type = other RNA
ggggtctatgtgaaaatgcccc

SEQ ID NO: 4774 - RNA, 22 nt, synthetic construct
  source 1..22: mol_type = other RNA
gggtctatgtgaaaatgccccc

SEQ ID NO: 4775 - RNA, 22 nt, synthetic construct
  source 1..22: mol_type = other RNA
ggtctatgtgaaaatgccccca

SEQ ID NO: 4776 - RNA, 22 nt, synthetic construct
  source 1..22: mol_type = other RNA
ggtttctcaattgatgggaata

SEQ ID NO: 4777 - RNA, 22 nt, synthetic construct
  source 1..22: mol_type = other RNA
gtaagagggcttcttttcttta

SEQ ID NO: 4778 - RNA, 22 nt, synthetic construct
  source 1..22: mol_type = other RNA
gtaattactgtttctttttgtg

SEQ ID NO: 4779 - RNA, 22 nt, synthetic construct
  source 1..22: mol_type = other RNA
gtcaaacacaaaaagaaacagt

SEQ ID NO: 4780 - RNA, 22 nt, synthetic construct
  source 1..22: mol_type = other RNA
gtctatgtgaaaatgcccccaa

SEQ ID NO: 4781 - RNA, 22 nt, synthetic construct
  source 1..22: mol_type = other RNA
gtgaaaagcaatttcagcctta

SEQ ID NO: 4782 - RNA, 22 nt, synthetic construct
  source 1..22: mol_type = other RNA
gtgaaaatgcccccaacagagc

SEQ ID NO: 4783 - RNA, 22 nt, synthetic construct
  source 1..22: mol_type = other RNA
gtgtttgacagctaaagaaaag

SEQ ID NO: 4784 - RNA, 22 nt, synthetic construct
  source 1..22: mol_type = other RNA
gttgggggcattttcacataga

SEQ ID NO: 4785 - RNA, 22 nt, synthetic construct
  source 1..22: mol_type = other RNA
gttgtaagagggcttcttttct

SEQ ID NO: 4786 - RNA, 22 nt, synthetic construct
  source 1..22: mol_type = other RNA
gtttctcaattgatgggaataa

SEQ ID NO: 4787 - RNA, 22 nt, synthetic construct
  source 1..22: mol_type = other RNA
gtttctttttgtgtttgacagc

SEQ ID NO: 4788 - RNA, 22 nt, synthetic construct
  source 1..22: mol_type = other RNA
gtttgacagctaaagaaaagaa

SEQ ID NO: 4789 - RNA, 22 nt, synthetic construct
  source 1..22: mol_type = other RNA
taaaataaggctgaaattgctt

SEQ ID NO: 4790 - RNA, 22 nt, synthetic construct
  source 1..22: mol_type = other RNA
taaagaaaagaagccctcttac

SEQ ID NO: 4791 - RNA, 22 nt, synthetic construct
  source 1..22: mol_type = other RNA
taagagggcttcttttctttag

SEQ ID NO: 4792 - RNA, 22 nt, synthetic construct
  source 1..22: mol_type = other RNA
taaggctgaaattgcttttcac

SEQ ID NO: 4793 - RNA, 22 nt, synthetic construct
  source 1..22: mol_type = other RNA
taatggtttctcaattgatggg

SEQ ID NO: 4794 - RNA, 22 nt, synthetic construct
  source 1..22: mol_type = other RNA
tacaacaggggtctatgtgaaa

SEQ ID NO: 4795 - RNA, 22 nt, synthetic construct
  source 1..22: mol_type = other RNA
tactgtttctttttgtgtttga

SEQ ID NO: 4796 - RNA, 22 nt, synthetic construct
  source 1..22: mol_type = other RNA
tagacccctgttgtaagagggc

SEQ ID NO: 4797 - RNA, 22 nt, synthetic construct
  source 1..22: mol_type = other RNA
tagctgtcaaacacaaaaagaa

SEQ ID NO: 4798 - RNA, 22 nt, synthetic construct
  source 1..22: mol_type = other RNA
tatgaagaagagagtccatatt

SEQ ID NO: 4799 - RNA, 22 nt, synthetic construct
  source 1..22: mol_type = other RNA
tatggactctcttcttcataat

SEQ ID NO: 4800 - RNA, 22 nt, synthetic construct
  source 1..22: mol_type = other RNA
tatgtgaaaatgcccccaacag

SEQ ID NO: 4801 - RNA, 22 nt, synthetic construct
  source 1..22: mol_type = other RNA
tattcccatcaattgagaaacc

SEQ ID NO: 4802 - RNA, 22 nt, synthetic construct
  source 1..22: mol_type = other RNA
tattttattcccatcaattgag

SEQ ID NO: 4803 - RNA, 22 nt, synthetic construct
  source 1..22: mol_type = other RNA
tcaaacacaaaaagaaacagta

SEQ ID NO: 4804 - RNA, 22 nt, synthetic construct
  source 1..22: mol_type = other RNA
tcaattgagaaaccattatgaa

SEQ ID NO: 4805 - RNA, 22 nt, synthetic construct
  source 1..22: mol_type = other RNA
tcacatagacccctgttgtaag

SEQ ID NO: 4806 - RNA, 22 nt, synthetic construct
  source 1..22: mol_type = other RNA
tcacattctggctctgttgggg

SEQ ID NO: 4807 - RNA, 22 nt, synthetic construct
  source 1..22: mol_type = other RNA
tcagccttattttattcccatc

SEQ ID NO: 4808 - RNA, 22 nt, synthetic construct
  source 1..22: mol_type = other RNA
tcagtagtaattactgtttctt

SEQ ID NO: 4809 - RNA, 22 nt, synthetic construct
  source 1..22: mol_type = other RNA
tcataatggtttctcaattgat

SEQ ID NO: 4810 - RNA, 22 nt, synthetic construct
  source 1..22: mol_type = other RNA
tcccatcaattgagaaaccatt

SEQ ID NO: 4811 - RNA, 22 nt, synthetic construct
  source 1..22: mol_type = other RNA
tcctcagtagtaattactgttt

SEQ ID NO: 4812 - RNA, 22 nt, synthetic construct
  source 1..22: mol_type = other RNA
tctatgtgaaaatgcccccaac

SEQ ID NO: 4813 - RNA, 22 nt, synthetic construct
  source 1..22: mol_type = other RNA
tctcaattgatgggaataaaat

SEQ ID NO: 4814 - RNA, 22 nt, synthetic construct
  source 1..22: mol_type = other RNA
tctcttcttcataatggtttct

SEQ ID NO: 4815 - RNA, 22 nt, synthetic construct
  source 1..22: mol_type = other RNA
tctggctctgttgggggcattt

SEQ ID NO: 4816 - RNA, 22 nt, synthetic construct
  source 1..22: mol_type = other RNA
tctgttgggggcattttcacat

SEQ ID NO: 4817 - RNA, 22 nt, synthetic construct
  source 1..22: mol_type = other RNA
tcttacaacaggggtctatgtg

SEQ ID NO: 4818 - RNA, 22 nt, synthetic construct
  source 1..22: mol_type = other RNA
tcttcataatggtttctcaatt

SEQ ID NO: 4819 - RNA, 22 nt, synthetic construct
  source 1..22: mol_type = other RNA
tcttcttcataatggtttctca

SEQ ID NO: 4820 - RNA, 22 nt, synthetic construct
  source 1..22: mol_type = other RNA
tctttagctgtcaaacacaaaa

SEQ ID NO: 4821 - RNA, 22 nt, synthetic construct
  source 1..22: mol_type = other RNA
tcttttctttagctgtcaaaca

SEQ ID NO: 4822 - RNA, 22 nt, synthetic construct
  source 1..22: mol_type = other RNA
tctttttgtgtttgacagctaa

SEQ ID NO: 4823 - RNA, 22 nt, synthetic construct
  source 1..22: mol_type = other RNA
tgaaaagcaatttcagccttat

SEQ ID NO: 4824 - RNA, 22 nt, synthetic construct
  source 1..22: mol_type = other RNA
tgaaaatgcccccaacagagcc

SEQ ID NO: 4825 - RNA, 22 nt, synthetic construct
  source 1..22: mol_type = other RNA
tgaaatatggactctcttcttc

SEQ ID NO: 4826 - RNA, 22 nt, synthetic construct
  source 1..22: mol_type = other RNA
tgaaattgcttttcacattctg

SEQ ID NO: 4827 - RNA, 22 nt, synthetic construct
  source 1..22: mol_type = other RNA
tgacagctaaagaaaagaagcc

SEQ ID NO: 4828 - RNA, 22 nt, synthetic construct
  source 1..22: mol_type = other RNA
tgagaaaccattatgaagaaga

SEQ ID NO: 4829 - RNA, 22 nt, synthetic construct
  source 1..22: mol_type = other RNA
tgatgggaataaaataaggctg

SEQ ID NO: 4830 - RNA, 22 nt, synthetic construct
  source 1..22: mol_type = other RNA
tgcccccaacagagccagaatg

SEQ ID NO: 4831 - RNA, 22 nt, synthetic construct
  source 1..22: mol_type = other RNA
tgcttttcacattctggctctg

SEQ ID NO: 4832 - RNA, 22 nt, synthetic construct
  source 1..22: mol_type = other RNA
tggactctcttcttcataatgg

SEQ ID NO: 4833 - RNA, 22 nt, synthetic construct
  source 1..22: mol_type = other RNA
tggctctgttgggggcattttc

SEQ ID NO: 4834 - RNA, 22 nt, synthetic construct
  source 1..22: mol_type = other RNA
tgggaataaaataaggctgaaa

SEQ ID NO: 4835 - RNA, 22 nt, synthetic construct
  source 1..22: mol_type = other RNA
tgggggcattttcacatagacc

SEQ ID NO: 4836 - RNA, 22 nt, synthetic construct
  source 1..22: mol_type = other RNA
tggtttctcaattgatgggaat

SEQ ID NO: 4837 - RNA, 22 nt, synthetic construct
  source 1..22: mol_type = other RNA
tgtaagagggcttcttttcttt

SEQ ID NO: 4838 - RNA, 22 nt, synthetic construct
  source 1..22: mol_type = other RNA
tgtcaaacacaaaaagaaacag

SEQ ID NO: 4839 - RNA, 22 nt, synthetic construct
  source 1..22: mol_type = other RNA
tgtgaaaagcaatttcagcctt

SEQ ID NO: 4840 - RNA, 22 nt, synthetic construct
  source 1..22: mol_type = other RNA
tgtgaaaatgcccccaacagag

SEQ ID NO: 4841 - RNA, 22 nt, synthetic construct
  source 1..22: mol_type = other RNA
tgtgtttgacagctaaagaaaa

SEQ ID NO: 4842 - RNA, 22 nt, synthetic construct
  source 1..22: mol_type = other RNA
tgttgggggcattttcacatag

SEQ ID NO: 4843 - RNA, 22 nt, synthetic construct
  source 1..22: mol_type = other RNA
tgttgtaagagggcttcttttc

SEQ ID NO: 4844 - RNA, 22 nt, synthetic construct
  source 1..22: mol_type = other RNA
tgtttctttttgtgtttgacag

SEQ ID NO: 4845 - RNA, 22 nt, synthetic construct
  source 1..22: mol_type = other RNA
tgtttgacagctaaagaaaaga

SEQ ID NO: 4846 - RNA, 22 nt, synthetic construct
  source 1..22: mol_type = other RNA
ttacaacaggggtctatgtgaa

SEQ ID NO: 4847 - RNA, 22 nt, synthetic construct
  source 1..22: mol_type = other RNA
ttactgtttctttttgtgtttg

SEQ ID NO: 4848 - RNA, 22 nt, synthetic construct
  source 1..22: mol_type = other RNA
ttagctgtcaaacacaaaaaga

SEQ ID NO: 4849 - RNA, 22 nt, synthetic construct
  source 1..22: mol_type = other RNA
ttatgaagaagagagtccatat

SEQ ID NO: 4850 - RNA, 22 nt, synthetic construct
  source 1..22: mol_type = other RNA
ttattcccatcaattgagaaac

SEQ ID NO: 4851 - RNA, 22 nt, synthetic construct
  source 1..22: mol_type = other RNA
ttcacatagacccctgttgtaa

SEQ ID NO: 4852 - RNA, 22 nt, synthetic construct
  source 1..22: mol_type = other RNA
ttcacattctggctctgttggg

SEQ ID NO: 4853 - RNA, 22 nt, synthetic construct
  source 1..22: mol_type = other RNA
ttcagccttattttattcccat

SEQ ID NO: 4854 - RNA, 22 nt, synthetic construct
  source 1..22: mol_type = other RNA
ttcataatggtttctcaattga

SEQ ID NO: 4855 - RNA, 22 nt, synthetic construct
  source 1..22: mol_type = other RNA
ttcccatcaattgagaaaccat

SEQ ID NO: 4856 - RNA, 22 nt, synthetic construct
  source 1..22: mol_type = other RNA
ttctcaattgatgggaataaaa

SEQ ID NO: 4857 - RNA, 22 nt, synthetic construct
  source 1..22: mol_type = other RNA
ttctggctctgttgggggcatt

SEQ ID NO: 4858 - RNA, 22 nt, synthetic construct
  source 1..22: mol_type = other RNA
ttcttcataatggtttctcaat

SEQ ID NO: 4859 - RNA, 22 nt, synthetic construct
  source 1..22: mol_type = other RNA
ttctttagctgtcaaacacaaa

SEQ ID NO: 4860 - RNA, 22 nt, synthetic construct
  source 1..22: mol_type = other RNA
ttcttttctttagctgtcaaac

SEQ ID NO: 4861 - RNA, 22 nt, synthetic construct
  source 1..22: mol_type = other RNA
ttctttttgtgtttgacagcta

SEQ ID NO: 4862 - RNA, 22 nt, synthetic construct
  source 1..22: mol_type = other RNA
ttgaaatatggactctcttctt

SEQ ID NO: 4863 - RNA, 22 nt, synthetic construct
  source 1..22: mol_type = other RNA
ttgacagctaaagaaaagaagc

SEQ ID NO: 4864 - RNA, 22 nt, synthetic construct
  source 1..22: mol_type = other RNA
ttgagaaaccattatgaagaag

SEQ ID NO: 4865 - RNA, 22 nt, synthetic construct
  source 1..22: mol_type = other RNA
ttgatgggaataaaataaggct

SEQ ID NO: 4866 - RNA, 22 nt, synthetic construct
  source 1..22: mol_type = other RNA
ttgcttttcacattctggctct

SEQ ID NO: 4867 - RNA, 22 nt, synthetic construct
  source 1..22: mol_type = other RNA
ttgggggcattttcacatagac

SEQ ID NO: 4868 - RNA, 22 nt, synthetic construct
  source 1..22: mol_type = other RNA
ttgtaagagggcttcttttctt

SEQ ID NO: 4869 - RNA, 22 nt, synthetic construct
  source 1..22: mol_type = other RNA
ttgtgtttgacagctaaagaaa

SEQ ID NO: 4870 - RNA, 22 nt, synthetic construct
  source 1..22: mol_type = other RNA
tttagctgtcaaacacaaaaag

SEQ ID NO: 4871 - RNA, 22 nt, synthetic construct
  source 1..22: mol_type = other RNA
tttattcccatcaattgagaaa

SEQ ID NO: 4872 - RNA, 22 nt, synthetic construct
  source 1..22: mol_type = other RNA
tttcacatagacccctgttgta

SEQ ID NO: 4873 - RNA, 22 nt, synthetic construct
  source 1..22: mol_type = other RNA
tttcacattctggctctgttgg

SEQ ID NO: 4874 - RNA, 22 nt, synthetic construct
  source 1..22: mol_type = other RNA
tttcagccttattttattccca

SEQ ID NO: 4875 - RNA, 22 nt, synthetic construct
  source 1..22: mol_type = other RNA
tttctcaattgatgggaataaa

SEQ ID NO: 4876 - RNA, 22 nt, synthetic construct
  source 1..22: mol_type = other RNA
tttctttagctgtcaaacacaa

SEQ ID NO: 4877 - RNA, 22 nt, synthetic construct
  source 1..22: mol_type = other RNA
tttctttttgtgtttgacagct

SEQ ID NO: 4878 - RNA, 22 nt, synthetic construct
  source 1..22: mol_type = other RNA
tttgacagctaaagaaaagaag

SEQ ID NO: 4879 - RNA, 22 nt, synthetic construct
  source 1..22: mol_type = other RNA
tttgtgtttgacagctaaagaa

SEQ ID NO: 4880 - RNA, 22 nt, synthetic construct
  source 1..22: mol_type = other RNA
ttttattcccatcaattgagaa

SEQ ID NO: 4881 - RNA, 22 nt, synthetic construct
  source 1..22: mol_type = other RNA
ttttcacatagacccctgttgt

SEQ ID NO: 4882 - RNA, 22 nt, synthetic construct
  source 1..22: mol_type = other RNA
ttttcacattctggctctgttg

SEQ ID NO: 4883 - RNA, 22 nt, synthetic construct
  source 1..22: mol_type = other RNA
ttttctttagctgtcaaacaca

SEQ ID NO: 4884 - RNA, 22 nt, synthetic construct
  source 1..22: mol_type = other RNA
ttttgtgtttgacagctaaaga

SEQ ID NO: 4885 - RNA, 22 nt, synthetic construct
  source 1..22: mol_type = other RNA
tttttgtgtttgacagctaaag

SEQ ID NO: 4886 - RNA, 22 nt, synthetic construct
  source 1..22: mol_type = other RNA
gctataaaaaaacaaccccgaa

SEQ ID NO: 4887 - RNA, 20 nt, synthetic construct
  source 1..20: mol_type = other RNA
aaaaaaatgtacttggttcc

SEQ ID NO: 4888 - RNA, 17 nt, synthetic construct
  source 1..17: mol_type = other RNA
aaaatgtacttggttcc

SEQ ID NO: 4889 - RNA, 17 nt, synthetic construct
  source 1..17: mol_type = other RNA
aaaaatgtacttggttc

SEQ ID NO: 4890 - RNA, 17 nt, synthetic construct
  source 1..17: mol_type = other RNA
aaaaaatgtacttggtt

SEQ ID NO: 4891 - RNA, 17 nt, synthetic construct
  source 1..17: mol_type = other RNA
aaaaaaatgtacttggt

SEQ ID NO: 4892 - protein, 1348 aa, synthetic construct
MSIKSDYFLGLDIGTDSIGWAVTDPEYHILRRKGKALWGIRLFDAANTAAERRTFRTSRRRIQRRRQRIRLLQELFAEEMVKLDPGFFQRLSDSAFWQEDKQEQQIYSLFTCENYTDVDYYREYPTIYHLRSALIQEKKEFDLRLLYLALHHLMKHRGHFLFNGSINNVTSFHTTFQTFADCLYDEFDIELECDSEDRFAEILKDKHARKTGKCSELEIICHIEKSNKQLKELFKLITGMKASLSVVFGDDELAEIEHNKISFSESSYDEVRLALEDEIQERTGILDIFHAVYSWAILADILEGGEYEGNSYLSVAKVSTYKKHGDDLRLLRTLVREYCPDHYKSFFSVSGKENYCAYAGTLKKNGKKQPIKRCSQEDFYKALKKLLNQMPTEQPEVKDIFIEIENGTFLPLQVSKDNGVIPYQVNKMELEKILQNAEEYLPFLKNIDEECGKTVSKKIIDLFEFRIPYYVGPLNTAKGENCWMVRKEAGRIYPWNFDEKVDRDQSAEKFIRRMTNQCTYLIHEDVVPKNSLLYSEFMVLNELNNVKIRSEKLPVELKQAIVLDLFKKQKQITGKKLLNYLNANGYDVKKEDLSGFDGNFKSSLSSYLTLKKVFGEELDKYSVQQMAEDIILWITLYGDDQKMLRRVIRKHYEQQLSEEQILSLSKLKFQGWGRLSRRLLSEMEGVDCETGECMTVMQGLRNTQNNLMQLLSQQFSFMELIEEENGNYYVDEITYDNLVKDMVISPSVKRAVWQTVQIVEEIKGVMGCQPKKIFVEMARSDEEKKRTVSRKDRLLEAYDAIKDEARQWQEELQKYSDGDFKAIKLYLYYTQMGQCMYTGRKIDLSQLNDATVWDRDHIYPQSKTKDDSLDNLVLVDRSVNAKKSDGMLSPEIQQRMRATWKYLKEKKLISEKKYERLTRVSPLTDEELAGFINRQLVETRQSSKAVATLLKRVYDEAEIVYVKAEAVSNFRRDNLDYIKVRDLNDYHHAKDAYQNIVVGNVFHEKFTSNPLRWLKNNPNTKYSLNQMFNFDLEKNGVVIWKRGKAGSIKCVEETLKRNDILFTRYAFCNKGGFFNQMLTAAPEDKTKAKGLVPIKKGMETWKYGGYTSVTPSHFMLVASKDKKGKEIRTIETVPLYRWKEFKENPDALLQYCREFYGLKEPKVLIPCIKKNARLVVNGFPMHLKGSTGKQLILQGAVQLCLNNENIKYLKKVTKYLEYNAQRRDKRTLLEVREVTGINKEENIQLYDVFVDKLSNTIYQYRPANPKDNLIKGREKFIELGLAEQCVVLGEVLHLFQCKPLTSDLTLIGGSPNTGTIKITKTISNCNVVKLLSQSIAGVKVREINLLII

SEQ ID NO: 4893 - DNA, 4047 bp, synthetic construct
  source 1..4047: mol_type = other DNA
atgagcataaaaagtgattattttttaggacttgatattggtacggattctattggatgggcggtaaccgacccagaatatcacatattgagacgaaaaggtaaagcattatggggaataagattatttgatgcggccaatacagcggcagaacggcgaacatttaggacaagccgaagaaggattcagagaagacgacagagaattcggttattgcaagaattatttgcagaagaaatggtaaaattagacccaggattttttcagaggttgtcagacagcgcattttggcaggaggataagcaagagcagcaaatttattcactttttacttgtgaaaattatacagatgttgattattacagagaatatcctactatttatcatttgagaagtgcattgattcaggaaaagaaggaatttgatcttcgtcttctatatcttgctcttcaccatttgatgaagcacaggggacatttcctgtttaatgggagtattaataatgtgacgtcatttcatacgacgtttcagacgtttgcagattgtctttatgatgagtttgatatagaactggaatgtgattccgaagatagatttgcagaaattttaaaggataaacatgccagaaaaacaggaaaatgttctgaattagagataatctgtcatatagaaaaatcaaataagcagctaaaagaactttttaaattaattacaggaatgaaagctagtttgagtgttgtgtttggtgatgatgagttagcggaaatagaacataataagattagtttttcagagagtagttatgatgaagtacgtcttgcattggaggatgagattcaggagaggactggtatactggatatctttcatgcagtttatagttgggcgattctcgcggatattttagaaggcggagaatatgaggggaattcttatctaagcgttgcgaaggtaagcacttataaaaagcatggtgatgatttgcggttgctaagaacactggttcgggaatattgtcctgatcattacaaatctttcttttccgtatcagggaaggagaattattgtgcatatgcgggtactttaaaaaagaatggaaaaaaacagccgattaaacgttgcagccaggaagatttttataaagcgttaaagaaattgctgaatcagatgccgacagaacaaccagaagtgaaagacatcttcatcgaaattgaaaatggtacttttttgccgttgcaggtaagtaaggataatggagtgataccttatcaggtaaataagatggaattagaaaaaatcctgcagaatgcagaggaatatttgccatttctaaaaaatatagatgaagaatgtggaaaaacggttagtaagaagattatagatctctttgagtttagaataccatattatgtagggccgcttaataccgctaaaggagaaaactgttggatggtcagaaaagaagcggggagaatatatccgtggaattttgatgaaaaggtagacagagatcaatcagcagaaaaatttatccgtagaatgacgaatcagtgtacatatttaatacatgaggatgttgtacctaaaaattctttgctttattcggagtttatggtgcttaatgaattaaataatgtaaagatccggtctgagaagctgccggtggagttaaaacaggcaatagtattggatttgtttaagaaacaaaagcagataacaggaaaaaaacttcttaattacttgaatgcaaatggatatgatgtaaaaaaagaagatttgtcagggtttgacggaaactttaaatcatctctgtcatcatatcttactttgaaaaaagtatttggtgaagaattagataaatatagtgtgcagcagatggcagaggatattatcttgtggatcactctgtatggagatgatcagaagatgttgcgcagggtaattcgaaaacattatgaacagcaattgagtgaagaacagattctttccttatcgaaattgaaattccaaggctggggaagattatccagacgacttttgagtgaaatggaaggcgttgattgtgagactggtgagtgtatgacggtcatgcaaggacttcgtaatactcagaataatctgatgcagcttctaagtcagcagttttcatttatggaattgattgaggaagaaaatgggaattattatgtagatgagattacatacgataatcttgtgaaagatatggttatatctccgtcagtgaagagagcagtctggcagacagttcagattgtggaggagattaagggggtaatgggctgtcagcctaagaagatatttgtcgagatggcgcgaagcgatgaagagaaaaagcgtactgtatctaggaaagacaggttattagaagcatatgatgcgatcaaggatgaggctcgtcaatggcaggaagagttgcaaaagtattcagatggtgattttaaggctattaaactttatctgtattatacgcagatggggcaatgtatgtatactggaagaaagatagatctgtcacaattaaatgatgcgacggtatgggacagagatcatatatatccacagtccaaaacaaaagatgatagtctggataatctggtattggtagaccggagcgtgaacgctaagaaaagtgatgggatgctatcacctgagattcagcagagaatgcgggctacttggaaatacttaaaagagaaaaagttgatttcagagaagaaatatgagcgtttgactagggtctcaccacttacagatgaggaattggcaggttttattaatcgacagttagttgaaacacgtcagtcttcgaaagcagtagcaacacttttgaaacgagtatatgatgaagcggagattgtctatgtaaaagcggaagctgtttcaaattttagaagagataatttggattatattaaggtgcgtgatctgaatgattatcatcatgctaaagatgcatatcagaatattgtagtggggaatgtttttcatgagaaatttaccagcaatccgcttcgttggctgaaaaacaatcctaatacgaaatatagtttaaatcagatgtttaactttgatttagagaaaaatggggtggtaatatggaaaagggggaaggctggaagtattaaatgtgttgaagaaacattgaaaagaaatgatattctttttacacgatatgctttttgtaataaaggtggtttttttaaccagatgttaacggcagctccagaagataaaacgaaagcaaagggacttgtaccaataaaaaaaggtatggaaacatggaaatacgggggatatacatcagtaactccgtcacattttatgttggttgcttcgaaagataagaaaggaaaggagataagaacgattgagacagttccgttgtataggtggaaagagttcaaagaaaatccagatgcattactccaatattgtagagagttctatggtttgaaagagcccaaggtgttgataccatgcatcaagaagaatgccagattagtcgttaatggatttccaatgcatttgaaagggagtacaggaaaacaattgattttgcagggagcggttcaattatgtctgaataatgaaaatataaagtatttgaaaaaagtcacaaaatatttggaatataatgcacagagaagagataaaagaacactgctggaagtaagagaggttacaggaattaacaaagaggaaaatatacagttatatgatgtgtttgttgataaattgagtaacacaatatatcagtatcgtccggccaatccaaaggacaatcttataaaaggaagagagaagtttatagaattagggttggcagaacaatgtgttgtgttaggtgaagtattgcatttgttccaatgtaaaccactcacgtctgatttgactttgattggaggttcaccgaatacagggacaataaaaataacaaagacaattagtaattgtaatgttgtaaagttgttaagccaatctattgcaggtgttaaagtgagagaaattaatttgttaataatatga

SEQ ID NO: 4894 - DNA, 4044 bp, synthetic construct
  source 1..4044: mol_type = other DNA
tctatcaagagcgactacttcctgggcctcgacatcggcacagattctatcggatgggccgtgacagaccccgagtaccacatcctgagaagaaagggcaaagccctgtggggcatcagactgttcgatgccgccaatactgccgccgagagaagaaccttccggaccagcagaagaagaatccagcggcggagacagcggatcagactgctgcaagagctgttcgccgaggaaatggttaagctggaccccggcttcttccagagactgagcgatagcgccttctggcaagaggacaagcaagagcagcagatctacagcctgtttacctgcgagaactacaccgacgtggactactacagagagtaccccaccatctaccacctgagaagcgccctgatccaagagaaaaaagagttcgacctgcggctgctgtatctggccctgcaccatctgatgaagcaccggggccactttctgttcaacggcagcatcaacaacgtgaccagcttccacaccaccttccagaccttcgccgactgcctgtacgacgagttcgacatcgagctggaatgcgacagcgaggacagattcgccgagatcctgaaggataagcacgccagaaagaccggcaagtgctctgagctggaaatcatctgccacatcgagaagtccaacaagcagctgaaagaactgttcaagctgatcaccggcatgaaggccagcctgagcgtggtgtttggagatgatgagctggccgagatcgagcacaacaagatcagcttcagcgagagcagctacgacgaagtgcggctggccctggaagatgagattcaagagagaaccggcatcctggacatcttccacgccgtgtattcttgggccatcctggccgatattctggaaggcggcgagtacgagggcaacagctatctgtctgtggccaaggtgtccacctacaagaagcacggcgacgacctgagactgctgagaacactcgtgcgcgagtactgccccgaccactacaagagctttttcagcgtgtccggcaaagagaactactgcgcctacgccggcacactgaagaagaacggcaagaagcagcccatcaagcggtgcagccaagaggacttctacaaggccctgaagaaactgctgaaccagatgcctaccgagcagcccgaagtgaaggatatcttcatcgagattgagaacggcaccttcctgcctctgcaagtgtccaaggacaacggcgtgatcccctaccaagtgaacaagatggaactcgagaagatcctgcagaacgccgaagagtacctgcctttcctgaagaacatcgacgaggaatgcggcaagaccgtgtccaagaagatcatcgacctgttcgagttcagaatcccctactacgtgggccctctgaataccgccaagggcgagaattgctggatggttcgaaaagaggccggcagaatctacccctggaacttcgatgagaaggtggacagagatcagagcgccgagaagttcatcagacggatgaccaaccagtgcacctacctgatccacgaggacgtggtgcctaagaacagcctgctgtactccgagttcatggtgctgaacgagctgaacaatgtgaagattcggagcgagaagctgcccgtggaactgaagcaggccatcgtgctggacctgtttaagaagcagaagcagatcacagggaagaagctgctcaactacctgaacgccaacggctacgacgtgaagaaagaggacctgagcggcttcgacggcaacttcaagtccagcctgtccagctacctgactctgaagaaggtgttcggagaggaactggacaagtacagcgtgcagcagatggccgaggacatcatcctgtggatcaccctgtatggcgacgatcagaaaatgctgcggagagtgatccggaagcactacgagcagcagctgtctgaggaacagatcctgagcctgagcaagctgaagttccaaggctggggcagactgtctagacggctgctctctgaaatggaaggcgtggactgtgaaaccggcgagtgcatgacagtgatgcagggcctgagaaacacccagaacaacctgatgcagctgctgagccagcagttcagcttcatggaactgatcgaggaagagaacgggaactactacgtcgacgagatcacctacgacaacctggtcaaggacatggtcatcagccctagcgtgaaaagggccgtgtggcagacagtgcagatcgtggaagaaatcaagggcgtgatgggatgccagcctaagaaaatcttcgtggaaatggcccgcagcgacgaagagaagaaacggaccgtgtctcggaaggatcggctgctggaagcctacgacgccatcaaggatgaggcccggcaatggcaagaagaactgcagaaatactccgacggcgatttcaaggccatcaagctgtacctgtactacacccagatgggccagtgcatgtacaccggcagaaaaatcgatctgtcccagctgaacgacgccaccgtgtgggatagagatcacatctaccctcagagcaagaccaaggacgacagcctggacaatctggtgctggtggatagatccgtgaatgccaagaaaagcgacggcatgctgagccccgagatccagcagagaatgagagccacctggaagtacctgaaagaaaagaagctcatcagcgagaagaagtacgagcggctgaccagagtgtcccctctgacagatgaagaactggccggcttcatcaaccggcagctggtggaaacaagacagagcagcaaagccgtggccacactgctgaagagggtgtacgatgaggccgagattgtgtatgtgaaggccgaggccgtgtctaacttccggcgggataacctggactacatcaaagtgcgggacctgaacgactaccaccacgccaaggacgcctaccagaacatcgtcgtgggcaacgtgttccacgagaagtttaccagcaatcccctgcggtggctgaaaaacaaccccaacaccaagtactccctcaaccagatgttcaacttcgacctggaaaagaacggcgtggtcatctggaagagaggcaaggccggctccattaagtgtgtggaagagacactgaagcggaacgacatcctgttcaccagatacgctttctgcaacaaaggcggcttctttaatcagatgctgaccgccgctccagaggataagacaaaggccaaaggcctggtgcctatcaagaaaggcatggaaacctggaaatacggcggctacaccagcgtgacccctagccactttatgctggtggccagcaaggacaagaagggaaaagagatccggaccatcgagacagtgcccctgtaccggtggaaagagttcaaagagaatcccgacgctctgctccagtactgcagagagttctacggcctgaaagagcccaaggttctgatcccttgcatcaagaagaatgcccggctggtcgtgaacggcttccctatgcacctgaagggcagcaccggaaaacagctgattctgcagggtgccgtgcagctgtgcctgaacaacgagaacatcaagtacctcaagaaagtgacgaagtacctcgagtacaacgcccagcggagagacaagagaaccctgctcgaagttcgggaagtgaccggaatcaacaaagaggaaaacatccagctgtacgatgtgttcgtggacaagctgagcaacacaatctaccagtacagacccgccaatcctaaggacaacctcatcaagggccgcgagaaattcatcgagcttggcctggctgagcagtgcgtggtgctgggagaagtgctgcatctgttccagtgcaagcccctgaccagcgatctgacactgatcggcggaagccctaacaccggcaccatcaagatcaccaagaccatcagcaactgcaacgtggtcaagctgctgtcccagtctatcgccggcgtgaaagtccgcgagatcaacctgctgatcatctga

SEQ ID NO: 4895 - RNA, 107 nt, synthetic construct
  source 1..107: mol_type = other RNA
gtttgagagtagtgtaagaaattacactacaagttcaaataaaaatttattcaaatccatttgctacattgtgtagaatttaaagatctggcaacagatcttttttt

1. A method for inactivating alleles of the Cytotoxic T-lymphocyte-associated protein 4 (CTLA4) gene in a cell, the method comprising
introducing to the cell a composition comprising:
at least one CRISPR nuclease, or a polynucleotide molecule encoding a CRISPR nuclease; and
an RNA molecule comprising a guide sequence portion, or a polynucleotide molecule encoding the RNA molecule,
wherein a complex of the CRISPR nuclease and the RNA molecule affects a double strand break in alleles of the CTLA4 gene, and
wherein the guide sequence portion of the RNA molecule comprises 17-50 contiguous nucleotides containing nucleotides in the sequence set forth in any one of SEQ ID NOs: 1-4891.

2. (canceled)

3. The method of claim 1, wherein the cell is a lymphocyte, a T cell, a T regulatory cell, a B cell, a natural killer (NK) cell, a macrophage, a stem cell, or a fibroblast, blood cell, hepatocyte, keratinocyte, or any other cell type capable of being reprogrammed to an induced pluripotent stem cell (iPSC), or
wherein the cell is a hematopoietic stem cell (HSC), induced pluripotent stem cell (iPS cell), iPSc-derived cell, natural killer cell (NK), iPS-derived NK cell (iNK), T cell, innate-like T cell (iT), natural killer T cell (NKT), γδ T cell, iPSc-derived T cell, invariant NKT cells (iNKT), iPSc-derived NKT, monocyte, or macrophage.

4. (canceled)

5. (canceled)

6. The method of claim 1, wherein alleles of the CTLA4 gene in the cell are subjected to an insertion or deletion mutation.

7. (canceled)

8. (canceled)

9. The method of claim 1, wherein the composition introduced to the cell further comprises a second RNA molecule comprising a guide sequence portion, wherein the guide sequence portion of the second RNA molecule comprises 17-50 contiguous nucleotides containing nucleotides in the sequence set forth in any one of SEQ ID NOs: 1-4891, wherein the guide sequence portion of the second RNA molecule differs from the guide sequence portion of the first RNA molecule.

10. A method for inactivating alleles of the Cytotoxic T-lymphocyte-associated protein 4 (CTLA4) gene in a cell, the method comprising
introducing to the cell a composition comprising:
at least one CRISPR nuclease, or a polynucleotide molecule encoding a CRISPR nuclease; and
an RNA molecule comprising a guide sequence portion, or a polynucleotide molecule encoding the RNA molecule,
wherein a complex of the CRISPR nuclease and the RNA molecule affects a double strand break in alleles of the CTLA4 gene, and
wherein the guide sequence portion of the RNA molecule comprises 17-50 contiguous nucleotides containing nucleotides in the sequence set forth in any one of SEQ ID NOs: 1-4891 modified to contain 1, 2, 3, 4, or 5 nucleotide mismatches relative to a fully-complementary target sequence of the guide sequence portion.

11. (canceled)

12. The method of claim 10, wherein the guide sequence portion provides higher targeting specificity to the complex of the CRISPR nuclease and the RNA molecule relative to a guide sequence portion that has higher complementarity to an allele of the CTLA4 gene.

13. The method of claim 10, wherein the composition introduced to the cell further comprises a second RNA molecule comprising a guide sequence portion, wherein the guide sequence portion of the RNA molecule comprises 17-50 contiguous nucleotides containing nucleotides in the sequence set forth in any one of SEQ ID NOs: 4891, or any one of SEQ ID NOs: 4891 modified to contain 1, 2, 3, 4, or 5 nucleotide mismatches relative to a fully-complementary target sequence of the guide sequence portion, wherein the guide sequence portion of the second RNA molecule differs from the guide sequence portion of the first RNA molecule.

14. A composition comprising:
at least one CRISPR nuclease, or a polynucleotide molecule encoding a CRISPR nuclease; and
an RNA molecule comprising a guide sequence portion, or a polynucleotide molecule encoding the RNA molecule,
wherein the guide sequence portion of the RNA molecule comprises 17-50 contiguous nucleotides containing nucleotides in the sequence set forth in any one of SEQ ID NOs: 1-48916, or in any one of SEQ ID NOs: 1-4891, modified to contain 1, 2, 3, 4, or 5 nucleotide mismatches relative to a fully target sequence of the guide sequence portion.

15. The composition of claim 14, further comprising a second RNA molecule which comprises a guide sequence portion comprising 17-50 contiguous nucleotides containing nucleotides in the sequence set forth in any one of SEQ ID NOs: 1-4891, or any one of SEQ ID NOs: 1-4891 modified to contain 1, 2, 3, 4, or 5 nucleotide mismatches relative to a fully-complementary target sequence of the guide sequence portion, wherein the guide sequence portion of the second RNA molecule differs from the guide sequence portion of the first RNA molecule.

16. (canceled)

17. (canceled)

18. (canceled)

19. (canceled)

20. A cell modified using the composition of claim 14.

21. (canceled)

22. (canceled)

23. The modified cell of claim 20, wherein the cell is a stem cell or any cell type capable of being reprogrammed to an induced pluripotent stem cell (iPSC).

24. (canceled)

25. (canceled)

26. (canceled)

27. Use of the composition of claim 14 for adoptive immunotherapy, comprising delivering the composition of claim 14, or a cell modified by the composition of claim 14, to a subject in need of adoptive immunotherapy.

28. (canceled)

29. (canceled)

30. (canceled)

31. (canceled)

32. (canceled)

33. A method of treating cancer, the method comprising delivering the composition of claim 14, or a cell modified by the composition of claim 14, to a subject in need of cancer treatment.

34. (canceled)

35. The method of claim 1, wherein the guide sequence portion of the RNA molecule further comprises 17-50 contiguous nucleotides containing nucleotides in the sequence set forth in any one of SEQ ID NOs: 2557, 2678, 2752, 2824, 3033, 3907, or 4886.

36. The method of claim 35, wherein at least one CRISPR nuclease is OMNI-103.

37. The method of claim 10, wherein the guide sequence portion of the RNA molecule further comprises 17-50 contiguous nucleotides containing nucleotides in the sequence set forth in any one of SEQ ID NOs: 2557, 2678, 2752, 2824, 3033, 3907, or 4886.

38. The method of claim 37, wherein at least one CRISPR nuclease is OMNI-103.

39. The composition of claim 14, wherein the guide sequence portion of the RNA molecule further comprises 17-50 contiguous nucleotides containing nucleotides in the sequence set forth in any one of SEQ ID NOs: 2557, 2678, 2752, 2824, 3033, 3907, or 4886.

40. The composition of claim 39, wherein at least one CRISPR nuclease is OMNI-103.
